(19) United States
(12) Patent Application Publication
(10) Pub. No.: US 2024/0066081 A1
(43) Pub. Date: Feb. 29, 2024

(54) CANINE DISTEMPER VIRUS HEMAGGLUTININ AND FUSION POLYPEPTIDES

(71) Applicant: Mayo Foundation for Medical Education and Research, Rochester, MN (US)

(72) Inventors: Stephen James Russell, Rochester, MN (US); Miguel A. Munoz Alia, Rochester, MN (US)

(21) Appl. No.: 17/767,970

(22) PCT Filed: Oct. 9, 2020
(86) PCT No.: PCT/US2020/055100

§ 371 Date: Apr. 11, 2022

Related U.S. Application Data
(60) Provisional application No. 62/913,111, filed on Oct. 9, 2019.

(51) Int. Cl. A61K 35/766; A61P 35/00; C07K 14/005; C07K 16/28; C12N 7/00

(52) U.S. Cl. CPC A61K 35/766; A61P 35/00; C07K 14/005; C07K 16/2896; C12N 7/00; C07K 2317/622; C07K 2317/92; C12N 2760/18422; C12N 2760/20232; C12N 2760/20243

(57) ABSTRACT

This document provides methods and materials related to CDV H and/or CDV F polypeptides. For example, CDV H polypeptides, CDV F polypeptides, recombinant viruses (e.g., vesicular stomatitis viruses (VSVs)) containing CDV H polypeptides and/or CDV F polypeptides, nucleic acid molecules encoding a CDV H polypeptide and/or CDV F polypeptide, methods for making recombinant viruses (e.g., VSVs) containing CDV H polypeptides and/or CDV F polypeptides, and methods for using recombinant viruses (e.g., VSVs) containing CDV H polypeptides and/or CDV F polypeptides to treat cancer or infectious diseases are provided.

### CROSS-REFERENCE TO RELATED APPLICATIONS

[0001] This application is a National Stage application under 35 U.S.C. § 371 of International Application No. PCT/US2020/055100, having an International Filing Date of Oct. 9, 2020, which claims the benefit of U.S. Provisional Application Ser. No. 62/913,111, filed Oct. 9, 2019. The disclosure of the prior application is considered part of (and is incorporated by reference in) the disclosure of this application.

### SEQUENCE LISTING

[0002] The instant application contains a Sequence Listing which has been submitted electronically in ASCII format and is hereby incorporated by reference in its entirety. Said ASCII copy, created on Nov. 25, 2020, is named 07039-1936WO1_SL.txt and is 1,096,580 bytes in size.

### 1. TECHNICAL FIELD

[0003] This document relates to canine distemper virus (CDV) hemagglutinin (H) and fusion (F) polypeptides. For example, this document relates to CDV H polypeptides, CDV F polypeptides, recombinant viruses (e.g., vesicular stomatitis viruses (VSVs)) containing CDV H polypeptides and/or CDV F polypeptides, nucleic acid molecules encoding a CDV H polypeptide and/or CDV F polypeptide, methods for making recombinant viruses (e.g., VSVs) containing CDV H polypeptides and/or CDV F polypeptides, and methods for using recombinant viruses (e.g., VSVs) containing CDV H polypeptides and/or CDV F polypeptides to treat cancer or infectious diseases.

### 2 Background Information

[0004] Viruses such as VSVs, measles viruses (MeVs), and adenoviruses can be used as oncolytic viruses to treat cancer. Vesicular stomatitis virus (VSV) is a member of the Rhabdoviridae family. The VSV genome is a single molecule of negative-sense RNA that encodes five major polypeptides: a nucleocapsid (N) polypeptide, a phosphoprotein (P) polypeptide, a matrix (M) polypeptide, a glycoprotein (G) polypeptide, and a viral polymerase (L) polypeptide.

### SUMMARY

[0005] This document provides methods and materials related to CDV H and/or CDV F polypeptides. For example, this document provides CDV H polypeptides, CDV F polypeptides, recombinant viruses (e.g., vesicular stomatitis viruses (VSVs)) containing CDV H polypeptides and/or CDV F polypeptides, nucleic acid molecules encoding a CDV H polypeptide and/or CDV F polypeptide, methods for making recombinant viruses (e.g., VSVs) containing CDV H polypeptides and/or CDV F polypeptides, and methods for using recombinant viruses (e.g., VSVs) containing CDV H polypeptides and/or CDV F polypeptides to treat cancer or infectious diseases.

[0006] As described herein, CDV F polypeptides can be designed to have increased fusogenic activity when expressed by cells in combination with a CDV H polypeptide as compared to the level of fusogenic activity of a wild-type CDV F polypeptide expressed by comparable cells in combination with that CDV H polypeptide. For example, CDV F polypeptides designed to have a truncated signal peptide sequence can exhibit increased fusogenic activity when expressed by cells in combination with a CDV H polypeptide (e.g., a wild-type or de-targeted CDV H polypeptide) as compared to the level of fusogenic activity of a wild-type CDV F polypeptide containing a full length signal peptide sequence expressed by comparable cells in combination with that CDV H polypeptide. Such CDV F polypeptides can be incorporated into a virus to create a recombinant virus having the ability to increase fusogenic activity observed in cells infected by that virus.

[0007] As also described herein, CDV H polypeptides can be designed to be de-targeted such that they do not have the ability, when used in combination with an F polypeptide (e.g., a CDV F polypeptide), to enter cells via, or fuse cells via, a Nectin 4 polypeptide, a SLAMF1 polypeptide, or a virus receptor present on wild-type Vero cells. Such CDV H polypeptides can provide a platform for designing H polypeptides having the ability to be re-targeted to one or more targets of interest. For example, an H polypeptide provided herein can be further engineered to contain a binding sequence (e.g., a single chain antibody (scFv) sequence) having binding specificity for a target of interest such that a recombinant virus containing that re-targeted H polypeptide, and an F polypeptide, can infect cells expressing that target.

[0008] In addition, viruses such as VSVs can be designed to have a nucleic acid molecule that encodes a VSV N polypeptide, a VSV P polypeptide, a VSV M polypeptide, a CDV F polypeptide (e.g., a wild-type CDV F polypeptide or an engineered CDV F polypeptide described herein), a CDV H polypeptide (e.g., a wild-type CDV H polypeptide or an engineered CDV H polypeptide described herein), and a VSV L polypeptide. Such a nucleic acid molecule can lack a functional VSV G polypeptide and/or lack the nucleic acid sequence that encodes a full-length VSV G polypeptide. For example, a VSV provided herein can be designed to have a nucleic acid molecule that encodes a VSV N polypeptide, a VSV P polypeptide, a VSV M polypeptide, a CDV F polypeptide (e.g., a wild-type CDV F polypeptide or an engineered CDV F polypeptide described herein), a CDV H polypeptide (e.g., a wild-type CDV H polypeptide or an engineered CDV H polypeptide described herein), and a VSV L polypeptide and lacks the ability to encode a functional VSV G polypeptide. In some cases, a VSV provided herein can be designed to have a nucleic acid molecule that encodes a VSV N polypeptide, a VSV P polypeptide, a VSV M polypeptide, a CDV F polypeptide (e.g., a wild-type CDV F polypeptide or an engineered CDV F polypeptide described herein), a CDV H polypeptide (e.g., a wild-type CDV H polypeptide or an engineered CDV H polypeptide described herein), and a VSV L polypeptide with the nucleic acid sequence encoding the CDV F polypeptide and the CDV H polypeptide being located in the position where the nucleic acid sequence encoding a full-length VSV G polypeptide is normally located in a wild-type VSV. In some cases, a VSV provided herein can be designed to have a nucleic acid molecule where the nucleic acid sequence encoding a VSV G polypeptide is replaced with nucleic acid that encodes a CDV F polypeptide (e.g., a wild-type CDV F polypeptide or an engineered CDV F polypeptide described herein) and a CDV H polypeptide (e.g., a wild-type CDV H polypeptide or an engineered CDV H polypeptide described herein).

[0009] As described herein, VSV/CDV hybrids can be designed to have CDV selectivity and a rapid replication as observed with wild-type or parental VSV. In some cases, a VSV/CDV hybrid provided herein can be designed to have a preselected tropism. For example, CDV F and/or H polypeptides having knocked out specificity for Nectin-4 and/or SLAMF1 can be used. In such cases, a scFv or polypeptide ligand can be attached to, for example, the C-terminus of the CDV H polypeptide. In such cases, the scFv or polypeptide ligand can determine the tropism of the VSV/CDV hybrid. Examples of scFvs that can be used to direct VSV/CDV hybrids to cellular receptors (e.g., tumor associated cellular receptors) include, without limitation, anti-EGFR, anti-αFR, anti-CD46, anti-CD38, anti-HER2/neu, anti-EpCAM, anti-CEA, anti-CD20, anti-CD133, anti-CD117 (c-kit), and anti-CD138 and anti-PSMA scFvs. Examples of polypeptide ligands that can be used to direct VSV/CDV hybrids include, without limitation, urokinase plasminogen activator uPA polypeptides, cytokines such as IL-13 or IL-6, single chain T cell receptors (scTCRs), echistatin polypeptides, stem cell factor (SCF), EGF and integrin binding polypeptides.

[0010] In some cases, a VSV/CDV hybrid provided herein can have a nucleic acid molecule that includes a sequence encoding an interferon (IFN) polypeptide (e.g., a human IFN-β polypeptide), a sodium iodide symporter (NIS) polypeptide (e.g., a human NIS polypeptide), a fluorescent polypeptide (e.g., a GFP polypeptide), any appropriate therapeutic transgene (e.g., HSV-TK or cytosine deaminase), polypeptide that antagonizes host immunity (e.g., influenza NS1, HSVγ34.5, or SOCS1), or tumor antigen (e.g., cancer vaccine components). The nucleic acid encoding the IFN polypeptide can be positioned between the nucleic acid encoding the VSV M polypeptide and the nucleic acid encoding the VSV L polypeptide. Such a position can allow the viruses to express an amount of the IFN polypeptide that is effective to activate anti-viral innate immune responses in non-cancerous tissues, and thus alleviate potential viral toxicity, without impeding efficient viral replication in cancer cells. The nucleic acid encoding the NIS polypeptide can be positioned between the nucleic acid encoding the VSV M polypeptide and the VSV L polypeptide. Such a position of can allow the viruses to express an amount of the NIS polypeptide that (a) is effective to allow selective accumulation of iodide in infected cells, thereby allowing both imaging of viral distribution using radioisotopes and radiotherapy targeted to infected cancer cells, and (b) is not so high as to be toxic to infected cells. Positioning the nucleic acid encoding an IFN polypeptide between the nucleic acid encoding the VSV M polypeptide and the nucleic acid encoding the VSV L polypeptide and positioning the nucleic acid encoding a NIS polypeptide between the nucleic acid encoding the VSV M polypeptide and the VSV L polypeptide within the genome of a VSV can result in VSVs that are viable, that have the ability to replicate and spread, that express appropriate levels of functional IFN polypeptides, and that expression appropriate levels of functional NIS polypeptides to take up radio-iodine for both imaging and radio-virotherapy.

[0011] In general, one aspect of this document features a CDV F polypeptide having signal peptide sequence that is less than 75 amino acid residues in length. The signal peptide sequence can comprise no more than 75 amino acid residues of SEQ ID NO:6. The CDV F polypeptide can comprise SEQ ID NO:4 with the proviso that the CDV F polypeptide lacks at least amino acid residues 1 to 60 or lacks at least amino acid residues 1 to 105 of SEQ ID NO:4. A recombinant virus comprising the CDV F polypeptide and a CDV H polypeptide can exhibit increased fusogenic activity as compared to a comparable control recombinant virus comprising a full length, wild-type CDV F polypeptide and the CDV H polypeptide.

[0012] In another embodiment, this document features a nucleic acid molecule encoding a CDV F polypeptide. The CDV F polypeptide can have a signal peptide sequence that is less than 75 amino acid residues in length. The signal peptide sequence can comprise no more than 75 amino acid residues of SEQ ID NO:6. The CDV F polypeptide can comprise SEQ ID NO:4 with the proviso that the CDV F polypeptide lacks at least amino acid residues 1 to 60 or lacks at least amino acid residues 1 to 105 of SEQ ID NO:4. A recombinant virus comprising the CDV F polypeptide and a CDV H polypeptide can exhibit increased fusogenic activity as compared to a comparable control recombinant virus comprising a full length, wild-type CDV F polypeptide and the CDV H polypeptide.

[0013] In another embodiment, this document features a recombinant virus comprising a CDV F polypeptide. The CDV F polypeptide can have a signal peptide sequence that is less than 75 amino acid residues in length. The signal peptide sequence can comprise no more than 75 amino acid residues of SEQ ID NO:6. The CDV F polypeptide can comprise SEQ ID NO:4 with the proviso that the CDV F polypeptide lacks at least amino acid residues 1 to 60 or lacks at least amino acid residues 1 to 105 of SEQ ID NO:4. A recombinant virus comprising the CDV F polypeptide and a CDV H polypeptide can exhibit increased fusogenic activity as compared to a comparable control recombinant virus comprising a full length, wild-type CDV F polypeptide and the CDV H polypeptide.

[0014] In another embodiment, this document features a recombinant virus comprising a nucleic acid molecule. The nucleic acid molecule can encode a CDV F polypeptide. The CDV F polypeptide can have a signal peptide sequence that is less than 75 amino acid residues in length. The signal peptide sequence can comprise no more than 75 amino acid residues of SEQ ID NO:6. The CDV F polypeptide can comprise SEQ ID NO:4 with the proviso that the CDV F polypeptide lacks at least amino acid residues 1 to 60 or lacks at least amino acid residues 1 to 105 of SEQ ID NO:4. A recombinant virus comprising the CDV F polypeptide and a CDV H polypeptide can exhibit increased fusogenic activity as compared to a comparable control recombinant virus comprising a full length, wild-type CDV F polypeptide and the CDV H polypeptide.

[0015] In another embodiment, this document features a CDV H polypeptide comprising 454A, 464A, 479A, 494A, 510A, 520A, 525A, 526A, 527S, 528A, 529A, 537A, 539A, 547A, 548A, or a combination thereof according to the amino acid numbering of SEQ ID NO:2. The CDV H polypeptide can comprise a combination of two, three, four, five, or six of 454A, 464A, 479A, 494A, 510A, 520A, 525A, 526A, 527S, 528A, 529A, 537A, 539A, 547A, and 548A. The CDV H polypeptide can comprise a combination of seven, eight, nine, ten, or eleven of 454A, 464A, 479A, 494A, 510A, 520A, 525A, 526A, 527S, 528A, 529A, 537A, 539A, 547A, and 548A. The CDV H polypeptide can comprise a combination of 12, 13, or 14 of 454A, 464A, 479A, 494A, 510A, 520A, 525A, 526A, 527S, 528A, 529A, 537A, 539A, 547A, and 548A. The CDV H polypeptide can comprise 454A, 464A, 479A, 494A, 510A, 520A, 525A, 526A, 527S, 528A, 529A, 537A, 539A, 547A, and 548A. The CDV H polypeptide can comprise M437 according to the amino acid numbering of SEQ ID NO:5.

[0016] In another embodiment, this document features a CDV H polypeptide comprising the sequence set forth in FIG. 11 except that the sequence comprises a mutation of a presented amino acid residue selected from the group consisting of P454, V/L/F460, L/F/W479, I494, I/J/V510, Y520, Y/N525, D/G526, I/V527, S/T528, R529, Y/D537, Y539, Y/F547, and T/M548 according to the amino acid numbering of SEQ ID NO:5. The CDV H polypeptide can comprise a mutation of two, three, four, five, or six presented amino acid residues selected from the group. The CDV H polypeptide can comprise a mutation of seven, eight, nine, ten, or eleven presented amino acid residues selected from the group. The CDV H polypeptide can comprise a mutation of 12, 13, or 14 presented amino acid residues selected from the group. The CDV H polypeptide can comprise a mutation of the presented amino acid residues of the group. The CDV H polypeptide can comprise M437 according to the amino acid numbering of SEQ ID NO:5.

[0017] In another embodiment, this document features a nucleic acid molecule encoding a CDV H polypeptide. The CDV H polypeptide can comprise the sequence set forth in FIG. 11 except that the sequence comprises a mutation of a presented amino acid residue selected from the group consisting of P454, V/L/F460, L/F/W479, I494, I/L/V510, Y520, Y/N525, D/G526, I/V527, S/T528, R529, Y/D537, Y539, Y/F547, and T/M548 according to the amino acid numbering of SEQ ID NO:5. The CDV H polypeptide can comprise a mutation of two, three, four, five, or six presented amino acid residues selected from the group. The CDV H polypeptide can comprise a mutation of seven, eight, nine, ten, or eleven presented amino acid residues selected from the group. The CDV H polypeptide can comprise a mutation of 12, 13, or 14 presented amino acid residues selected from the group. The CDV H polypeptide can comprise a mutation of the presented amino acid residues of the group. The CDV H polypeptide can comprise M437 according to the amino acid numbering of SEQ ID NO:5.

[0018] In another embodiment, this document features a recombinant virus comprising a CDV H polypeptide. The CDV H polypeptide comprising the sequence set forth in FIG. 11 except that the sequence comprises a mutation of a presented amino acid residue selected from the group consisting of P454, V/L/F460, L/F/W479, I494, I/L/V510, Y520, Y/N525, D/G526, I/V527, S/T528, R529, Y/D537, Y539, Y/F547, and T/M548 according to the amino acid numbering of SEQ ID NO:5. The CDV H polypeptide can comprise a mutation of two, three, four, five, or six presented amino acid residues selected from the group. The CDV H polypeptide can comprise a mutation of seven, eight, nine, ten, or eleven presented amino acid residues selected from the group. The CDV H polypeptide can comprise a mutation of 12, 13, or 14 presented amino acid residues selected from the group. The CDV H polypeptide can comprise a mutation of the presented amino acid residues of the group. The CDV H polypeptide can comprise M437 according to the amino acid numbering of SEQ ID NO:5. The virus can comprise a CDV F polypeptide, wherein the CDV F polypeptide comprises a signal peptide sequence that is less than 75 amino acid residues in length. The signal peptide sequence can comprise no more than 75 amino acid residues of SEQ ID NO:6. The CDV F polypeptide can comprise SEQ ID NO:4 with the proviso that the CDV F polypeptide lacks at least amino acid residues 1 to 60 or lacks at least amino acid residues 1 to 105 of SEQ ID NO:4. A recombinant virus comprising the CDV F polypeptide and a CDV H polypeptide can exhibit increased fusogenic activity as compared to a comparable control recombinant virus comprising a full length, wild-type CDV F polypeptide and the CDV H polypeptide.

[0019] In another embodiment, this document features a recombinant virus comprising a nucleic acid molecule encoding a CDV H polypeptide. The CDV H polypeptide can comprise the sequence set forth in FIG. 11 except that the sequence comprises a mutation of a presented amino acid residue selected from the group consisting of P454, V/L/F460, L/F/W479, I494, I/L/N510, Y520, Y/N525, D/G526, I/V527, S/T528, R529, Y/D537, Y539, Y/F547, and T/M548 according to the amino acid numbering of SEQ ID NO:5. The CDV H polypeptide can comprise a mutation of two, three, four, five, or six presented amino acid residues selected from the group. The CDV H polypeptide can comprise a mutation of seven, eight, nine, ten, or eleven presented amino acid residues selected from the group. The CDV H polypeptide can comprise a mutation of 12, 13, or 14 presented amino acid residues selected from the group. The CDV H polypeptide can comprise a mutation of the presented amino acid residues of the group. The CDV H polypeptide can comprise M437 according to the amino acid numbering of SEQ ID NO:5.

[0020] The virus can comprise a nucleic acid molecule encoding a CDV F polypeptide. The CDV F polypeptide can have a signal peptide sequence that is less than 75 amino acid residues in length. The signal peptide sequence can comprise no more than 75 amino acid residues of SEQ ID NO:6. The CDV F polypeptide can comprise SEQ ID NO:4 with the proviso that the CDV F polypeptide lacks at least amino acid residues 1 to 60 or lacks at least amino acid residues 1 to 105 of SEQ ID NO:4. A recombinant virus comprising the CDV F polypeptide and a CDV H polypeptide can exhibit increased fusogenic activity as compared to a comparable control recombinant virus comprising a full length, wild-type CDV F polypeptide and the CDV H polypeptide.

[0021] In another embodiment, this document features a recombinant virus described herein that is a hybrid virus of (a) CDV and (b) VSV, MeV, or Adenovirus.

[0022] In another embodiment, this document features a replication-competent vesicular stomatitis virus comprising an RNA molecule, wherein the RNA molecule comprises a nucleic acid sequence that is a template for a positive sense transcript encoding a VSV N polypeptide, a nucleic acid sequence that is a template for a positive sense transcript encoding a VSV P polypeptide, a nucleic acid sequence that is a template for a positive sense transcript encoding a VSV M polypeptide, a nucleic acid sequence that is a template for a positive sense transcript encoding a CDV F polypeptide, a nucleic acid sequence that is a template for a positive sense transcript encoding a CDV H polypeptide, and a nucleic acid sequence that is a template for a positive sense transcript encoding a VSV L polypeptide, wherein the RNA molecule lacks a nucleic acid sequence that is a template for a positive sense transcript encoding a functional VSV G polypeptide. The CDV F polypeptide can have a signal peptide sequence that is less than 75 amino acid residues in length. The signal peptide sequence can comprise no more than 75 amino acid residues of SEQ ID NO:6. The CDV F polypeptide can comprise SEQ ID NO:4 with the proviso that the CDV F polypeptide lacks at least amino acid residues 1 to 60 or lacks at least amino acid residues 1 to 105 of SEQ ID NO:4. A recombinant virus comprising the CDV F polypeptide and a CDV H polypeptide can exhibit increased fusogenic activity as compared to a comparable control recombinant virus comprising a full length, wild-type CDV F polypeptide and the CDV H polypeptide. The CDV H polypeptide can be a CDV H polypeptide described in one of the preceding paragraphs. The CDV H polypeptide can comprises an amino acid sequence of a single chain antibody. The single chain antibody can be a single chain antibody directed to CD19, CD20, CD38, CD46, EGFR, αFR, HER2/neu, or PSMA. The RNA molecule can comprise a nucleic acid sequence that is a template for a positive sense transcript encoding a NIS polypeptide.

[0023] In another embodiment, this document features a composition comprising a virus of any of the preceding paragraphs.

[0024] In another embodiment, this document features a nucleic acid molecule comprising a nucleic acid strand comprising a nucleic acid sequence that is a template for a positive sense transcript encoding a VSV N polypeptide, a nucleic acid sequence that is a template for a positive sense transcript encoding a VSV P polypeptide, a nucleic acid sequence that is a template for a positive sense transcript encoding a VSV M polypeptide, a nucleic acid sequence that is a template for a positive sense transcript encoding a CDV F polypeptide, a nucleic acid sequence that is a template for a positive sense transcript encoding a CDV H polypeptide, and a nucleic acid sequence that is a template for a positive sense transcript encoding a VSV L polypeptide, wherein the nucleic acid strand lacks a nucleic acid sequence that is a template for a positive sense transcript encoding a functional VSV G polypeptide. The CDV F polypeptide can have a signal peptide sequence that is less than 75 amino acid residues in length. The signal peptide sequence can comprise no more than 75 amino acid residues of SEQ ID NO:6. The CDV F polypeptide can comprise SEQ ID NO:4 with the proviso that the CDV F polypeptide lacks at least amino acid residues 1 to 60 or lacks at least amino acid residues 1 to 105 of SEQ ID NO:4. A recombinant virus comprising the CDV F polypeptide and a CDV H polypeptide can exhibit increased fusogenic activity as compared to a comparable control recombinant virus comprising a full length, wild-type CDV F polypeptide and the CDV H polypeptide. The CDV H polypeptide can be a CDV H polypeptide described in one of the preceding paragraphs. The CDV H polypeptide can comprises an amino acid sequence of a single chain antibody. The single chain antibody can be a single chain antibody directed to CD19, CD20, CD38, CD46, EGFR, αFR, HER2/neu, or PSMA. The RNA molecule can comprise a nucleic acid sequence that is a template for a positive sense transcript encoding a NIS polypeptide.

[0025] In another embodiment, this document features a composition comprising a nucleic acid molecule of any of the preceding paragraphs.

[0026] In another embodiment, this document features a method for treating cancer. The method comprises administering a composition described herein (e.g., a composition containing a virus described herein) to a mammal comprising cancer cells, wherein the number of cancer cells within the mammal is reduced following the administration. The mammal can be a human. The cancer can be myeloma, melanoma, glioma, lymphoma, mesothelioma, lung cancer, brain cancer, stomach cancer, colon cancer, rectum cancer, kidney cancer, prostate cancer, ovary cancer, breast cancer, pancreas cancer, liver cancer, or head and neck cancer.

[0027] In another embodiment, this document features a method for inducing tumor regression in a mammal. The method comprises administering a composition described herein (e.g., a composition containing a virus described herein) to a mammal comprising a tumor, wherein the size of the tumor is reduced following the administration. The mammal can be a human. The cancer can be myeloma, melanoma, glioma, lymphoma, mesothelioma, lung cancer, brain cancer, stomach cancer, colon cancer, rectum cancer, kidney cancer, prostate cancer, ovary cancer, breast cancer, pancreas cancer, liver cancer, or head and neck cancer.

[0028] In another embodiment, this document features a method for rescuing replication-competent vesicular stomatitis viruses from cells. The vesicular stomatitis viruses comprise an RNA molecule comprising a nucleic acid sequence that is a template for a positive sense transcript encoding a VSV N polypeptide, a nucleic acid sequence that is a template for a positive sense transcript encoding a VSV P polypeptide, a nucleic acid sequence that is a template for a positive sense transcript encoding a VSV M polypeptide, a nucleic acid sequence that is a template for a positive sense transcript encoding a CDV F polypeptide, a nucleic acid sequence that is a template for a positive sense transcript encoding a CDV H polypeptide, and a nucleic acid sequence that is a template for a positive sense transcript encoding a VSV L polypeptide, wherein the RNA molecule lacks a nucleic acid sequence that is a template for a positive sense transcript encoding a functional VSV G polypeptide. The method comprises (a) inserting nucleic acid encoding the RNA molecule into the cells under conditions wherein replication-competent vesicular stomatitis viruses are produced, and (b) harvesting the replication-competent vesicular stomatitis viruses.

[0029] Unless otherwise defined, all technical and scientific terms used herein have the same meaning as commonly understood by one of ordinary skill in the art to which this invention pertains. Although methods and materials similar or equivalent to those described herein can be used to practice the invention, suitable methods and materials are described below. All publications, patent applications, patents, and other references mentioned herein are incorporated by reference in their entirety. In case of conflict, the present specification, including definitions, will control. In addition, the materials, methods, and examples are illustrative only and not intended to be limiting.

[0030] The details of one or more embodiments of the invention are set forth in the accompanying drawings and the description below. Other features, objects, and advantages of the invention will be apparent from the description and drawings, and from the claims.

### DESCRIPTION OF DRAWINGS

[0031] FIG. 1. Molecular phylogenetic analysis by Maximum Likelihood method of the hemagglutinin gene of CDV genotypes. The tree was inferred by using the Maximum Likelihood method based on the General Time Reversible model. The analysis involved 119 complete CDV H nucleotides sequences. The strains 22458/15 and 5804 were classified as Artic-like and Europe-1/South America 1 genotypes, respectively. Evolutionary analyses were conducted in MEGA7.

[0032] FIG. 2. Generation CDV H/F complexes for targeted-cell fusion. (A) Syncytia formation assay: Monolayers of Vero cells and Vero cells expressing human Nectin-4 polypeptides or dog SLAMF1 polypeptides were co-transfected with H and F polypeptide-encoding expression plasmids from CDV₅₈₀₄, CDV_{22458/16}, or CDV_{onderstepoort} (large-plaque-forming) (CDV_{OL}) as indicated. Syncytia formation was recorded 24 hours later after Giemsa staining. (B) Cells were additionally transfected with a GFP expression plasmid to enhance the sensitivity. DAPI was used for nuclei staining. (C) Schematic drawing of a receptor expanded morbillivirus attachment protein. The receptor binding protein contained a cytoplasmic tail (C), transmembrane domain (T), and an ectodomain fused to a CD38-specific single chain variable fragment (scFv) followed by a His tag. (D) Surface expression of receptor expanded morbillivirus attachment proteins. HEK293T cells were transfected with the indicated attachment proteins retargeted against CD38 receptor, and surface expression was analyzed by FACS using a PE-conjugated anti-HIS antibody. (E) Schematic representation of the quantitative fusion assay based on the self-associating split luciferase assay. Effector cells were transfected with H and F polypeptide-encoding plasmids and plasmids encoding half of the renilla luciferase (RL) and green fluorescence proteins (GFP). Target cells, bearing the receptors, were transfected with plasmids encoding the other half of dual-split reporter genes and mixed with the effector cells. Upon content mixing, the otherwise nonfunctional halves of the reporter genes reconstitute the enzyme activity, which was measured in real time. (F) Cell-targeted fusion activity of CD38-receptor expanded morbillivirus attachment proteins. Effector cells were co-transfected with the attachment/fusion polypeptide pairs indicated. After co-culture with the target cells, luminescence signal was registered. Values and error bars (SDs) were from one representative experiment performed at least in triplicate. Of note, the CDV F signal peptide was replaced with the homologous form from MEV (MeV SP). Statistical significance was calculated by two-way ANOVA with Turkey multiple-comparison test. *, p<0.02; ***, p<0.0005; ****, p<0.0001. (G) Integrity of CDV H polypeptides. HEK293T cells were transfected with the indicated CDV H polypeptides, and cell lysates were immunoblotted with anti-HIS antibodies (CDV H) or anti-β-actin (loading control). (H) Cell-targeted fusion of retargeted H/F complexes. Cell fusion was determined as described in (C). Effector cells were co-transfected with the receptor-blind, CD38 retargeted pairs MeV H/F and CDV H₅₈₀₄/F_{22458/16} and overlaid with CHO cells expressing relevant receptors. Values and error bars (SDs) were from one representative experiment performed at least in triplicate. (I) Retargeting the CDV H/F complex to Her2/neu. A cell fusion assay was performed using CDV H/F complexes displaying Her2/neu-specific scFv or affibodies (Z_{X}). Binding affinities for the displayed ligand are shown. (J) Relationship between receptor expression and receptor-binding affinity. Fusion activity of CDV H polypeptides displaying Her2/neu-specific affibodies with different affinities was assessed on Her2/neu positive cell lines: HT1080 (3.4×10³ molecules/cell), Sko3pi (4.19×10³ molecules/cell), TET67L (1.5×10⁵ molecules/cell). Cells transfected only with CDV F were used as a negative control.

[0033] FIG. 3. H/F complexes from CDV can replace the envelope glycoproteins from measles virus to result in cell-targeted entry and anti-measles virus antibody resistance. (A) Cell surface expression. CHO cells were transfected with the indicated H polypeptide expressing plasmid (HIS-tagged) along with one of the DSP plasmids and a F polypeptide (MeV or CDV F224568/16) expressing plasmid. 24 hours later, H expression was determined by CELISA with anti-HIS antibodies. (B) CHO cells transfected as in (A) were co-cultured with the indicated CHO cell derivate and luminescence values were obtained for a 9-hour time course. Values and error bars (SDs) were from one representative experiment performed at least in triplicate. (C) Protein composition of measles virus encoding CDV H/F complexes targeted against CD46 (scFv A09, Stealth 2.0). 1.6E4 TCID₅₀ particles were subjected to SDS-PAGE and immunoblotted with the relevant antibody. Measles Virus was used as a control. (D) Replication kinetics. The growth kinetic of Stealth 2.0 virus was determined on Vero and Vero-HIS (multiplicity of infection (MOI)=0.03) at the indicated time points. The growth kinetics of MeV on Vero/hSLAMF1 cells was included for comparison purposes. (E) Neutralization assay. A fluorescence focus reduction neutralization assay was performed with MeV and CDV antisera. Different dilutions of the antiserum were pre-incubated for 1 hour at 37° C. with a fixed amount of virus. The mix was then used to infect Vero-HIS cells, and the amount of virus in control wells without antibodies was set to 100%. All neutralization curves represent the mean and SD of four replicate curves run on the same 96-well plate. (F) Receptor-selectivity of recombinant viruses. CHO cells expressing the relevant receptors were infected with the recombinant viruses at the indicated MOI. GFP auto-fluorescence was recorded 2 days later.

[0034] FIG. 4. Oncolytic activity of CD46-targeted envelope chimeric MeV. CDB17 SCID mice were implanted subcutaneously with the human myeloma cell line U266.B1. When tumor volume reached 500 mm³, mice were randomized and left untreated (PBS control) or treated once with 1×10⁵ TCID⁵⁰ particles administered intravenously. Tumor volumes (B) and survival (C) was recorded afterwards.

[0035] FIG. 5. Schematic of exemplary recombinant VSVs according to some embodiments. VSV-hIFNβ-NIS: VSV Indiana was engineered to express human interferon beta (hIFNβ) at the M/G intergenic region, and human sodium iodide symporter (NIS) at the G/L intergenic region and rescued as described elsewhere (Naik et al., Leukemia, 26:1870-78 (2012)). VSV expressing CDV-F_{22455/16} (with the CDV F polypeptide signal peptide replaced with that of MeV F polypeptide) and CDV-H₅₈₀₄ were generated using the pVSV-smart platform. Point mutations in the CDV-H₅₈₀₄ polypeptide, Y539A and R529A, were introduced by site-directed mutagenesis to ablate natural tropisms to canine Nectin-4 and SLAMF1 polypeptides, respectively. Targeted viruses were generated by displaying EGFR or CD38-targeted scFvs at the C-terminus of CDV-H₅₈₀₄ with an IGES linker peptide and an H6 polyhistidine tag (SEQ ID NO: 21). Retargeted VSV-CDV F/H constructs were rescued on Vero-anti-H6, allowing infection, virus amplification, and fusion of target cells. The titers for each recombinant virus are indicated.

[0036] FIG. 6. Monolayers of the indicated CHO cells (wild-type or stably overexpressing the indicated receptors) were mock infected or infected (MOI=0.2) with VSV-CDVFH-GFP or VSV-CDVF/Hₐₐ-αEGFR-GFP. Fluorescent micrographs were taken under 100× magnification at the indicated times. GFP expression (green) correlates with virus infection and spread within the monolayers.

[0037] FIG. 7. Monolayers of the indicated CHO cells (wild-type or stably expressing receptors EGFR or CD38) were infected (MOI=0.1) with VSV-CDVFHₐₐ-αEGFR or VSV-CDVFHₐₐ-αCD38. After 42 hours, cell monolayers were fixed with paraformaldehyde and stained with crystal violet. Photos were taken under 40× magnification.

[0038] FIG. 8. Therapeutic effects of chimeric VSV-CDVFHaa-αEGFR against xenografted human ovarian cancer in the peritoneum. Female 5-6 week-old athymic nude mice (Envigo, Indianapolis, IN) were implanted intraperitoneally with 2×10⁶ SKOV3ip.1-Fluc cells (200 μL/mouse) (day −7). 7 days post-implantation (day 0), tumor-bearing mice were randomized based on firefly luciferase signals using IVIS spectrum (Perkin Elmer, Hopkinton, MA). Mice were identified by microchip and ear notch. Following randomization, mice received a single dose of 1×10⁷ TCID₅₀ of virus or saline control (250 μL/mouse) via intraperitoneal injection. Mice were euthanized if they developed ascites, subcutaneous injection site tumors that were >10% of body weight, or if they lost >20% of body weight. All surviving mice were euthanized at the end of the experiment (day 92 after virus treatment). Kaplan-Meier survival curves were plotted and compared by log-rank sum test. Clinical observations and weight were recorded three times per week until end of study or euthanasia of the mouse.

[0039] FIG. 9 is a nucleic acid sequence (SEQ ID NO:1) of a CDV H open reading frame encoding a CDV H polypeptide (SEQ ID NO:2).

[0040] FIG. 10 is a nucleic acid sequence (SEQ ID NO:3) of a CDV F open reading frame encoding a CDV F polypeptide (SEQ ID NO:4).

[0041] FIG. 11. Retargeting wild-type CDV envelope to EGFR and CD38. (A) Schematic representation of cloning strategy to generate retargeted wild-type CDV H polypeptides (top). Standard one-letter amino acid abbreviations are used to denote the changes introduced to ablate native receptor (SLAMF1 and Nectin-4) usage (bottom). The amino acid numbering is with respect to SEQ ID NO:5. The single-chain antibody fragments are displayed as a C-terminal extension of the H glycoprotein using a Factor Xa (Fxa) cleavage site (an IEGR amino acid sequence). There is an optional six-histidine tag (SEQ ID NO: 21) in all of the constructs to facilitate virus rescue on Vero-His cells. (B) Co-transfection experiments demonstrating targeted fusion competence of receptor blind H polypeptide targeted to CD38. CHO-CD38 cells in 12 well plates were co-transfected with either CMV driven CDV F plasmid and CMV driven wild-type CDV H-CD38 or CMV driven receptor blind CDV H-CD38, and cells were fixed, stained and imaged 24 hours later. (C) Targeted cell fusion mediated by CDV H constructs was resistant to pooled measles immune human serum. CHO-CD38 cells were co-transfected with CMV driven H and F plasmids together with a CMV driven GFP plasmid for visualization and incubated with indicated dilutions. Cells were photographed 24 hours after transfection. (D) Chimeric measles viruses bearing targeted CDV H polypeptides retain specificity on a panel of CHO cells expressing the desired receptors or human tumor cell lines with the desired receptor. Cell lines were infected with the respective viruses at an MOI of 0.5, and photographed were taken 48 hours later. (E) Schematic design of experiment to test in vivo oncolytic efficacy and specificity of chimeric measles viruses with retargeted CDV envelope. Nude mice were implanted with 5×10⁶ SKOV3ip-fluc cells either subcutaneously (SQ) or intraperitoneally (IP) followed by 6 doses of 1×10⁶ TCID₅₀/mL intratumorally (IT) for subcutaneous tumors or 2×10⁶ TCID₅₀/mL IP for IP tumors every other day beginning on day 10. (F) Individual tumor volumes of subcutaneous SKOV3ip tumors treated with respective viruses (top) and survival of animals with intraperitoneal tumors treated with respective viruses (bottom).

[0042] FIG. 12 is an alignment of a representative number of CDV H polypeptides. The top sequence (designated AF378705.1_America1) is SEQ ID NO:5 and used for numbering purposes where indicated. FIG. 12 discloses SEQ ID NOS 5, 31-109, 105, 110-145, and 227-228, respectively, in order of appearance.

[0043] FIG. 13 is an alignment of a representative number of CDV F polypeptides. The signal peptide sequence extends from amino acid position 1 to amino acid position 135. The top sequence (designated AF378705.1_America1) is SEQ ID NO:7 and used for numbering purposes where indicated. FIG. 13 discloses SEQ ID NOS 7 and 146-226, respectively, in order of appearance.

[0044] FIG. 14. CDV OL can infect cells lacking SLAMF1 and NECTIN4 receptors. (A) Assessment of infection of Vero cells by CDV isolates in comparison with the OL strain. Cells were infected at an MOI of 0.1 (determined on Vero-dogSLAMF1 cells) and stained with Hema-Quick 48 hours later for visualization. (B) A panel of CHO cells expressing different relevant receptors was infected with an eGFP reporter MeV comprising the CDV H/F OL glycoproteins. Infectivity was reported using a fluorescence microscope. Magnification 40×.

[0045] FIG. 15. Heterologous combination of wild-type CDV H/F with a shortened signal peptide results in enhanced receptor-dependent fusion due to a weaker H-F interaction. (A) Syncytia formation in cells cotransfected with CDV-F, CDV-H, and eGFP. The signal peptides of CDV-F were replaced with the homolog from MeV-F, as indicated by the black boxes in the schematic. Twenty-four hours after cotransfection, fusion score was assessed under the GFP channel. (B) Quantitative fusion assay. Effector BHK cells were transfected with the indicated combination of attachment (CDV-H or Nipah-G) and fusion (F) proteins plus one of the dual-split reporter plasmids. Target CHO cells and CHO cells expressing CD38 (CHO-CD38) were transfected with the other dual-split reporter plasmids. 16 hours post-transfection cells were overlaid and Renilla luciferase activity was determined (RLU) 8 hours later. Values represent the mean ±standard deviation (SD) of one representative experiment performed in triplicate. Statistical significance was determined using one-way ANOVA with Holm-Sidak's multiple comparison test (ns, not significant *, p<0.05; **, p<0.002; ***, p<0.0001). (C) CDV-H/F coimmunoprecipitation. HEK293T cells transiently expressing either wt or mutant HIS-tagged CDV-H proteins together with FLAG-tagged CDV-F proteins were lysed and immunoprecipitated (IP) with an anti-FLAG antibody. The signal intensity was determined using an anti-HIS antibody. (D) Quantitative fusion assay of fully retargeted CDV-H and MeV-H proteins onto CHO cells and CHO cells derivates. Either HIS-tagged or HIS-tagged and CD38-retargeted MeV-H/F and CDV-H/F complexes were transfected into effector cells and luminescence signal was determined over time. MeV-Haals=MeV-H blinded for CD46, NECTIN-4 and SLAMF1 via mutations Y481A, R533A, S548L and F549S.

[0046] FIG. 16. Conservation of amino acid residue M437 in the CDV-H protein among different genetic groups. Sequence alignment was performed with CDV-H sequences retrieved from GenBank, including the CDV-H sequence determined here for the SPA.Madrid/22458/16 isolate. The accession numbers are indicated.

[0047] FIG. 17. Integrity and expression of chimeric ligand-displaying receptor binding proteins. (A) Western blot analysis of HEK293T cells transfected with the indicated proteins fused to an anti-CD38 scFv or not. Proteins were blotted with an anti-HIS antibody or an anti-β-actin antibody (loading control). (B) Protein expression of the attachment proteins and mutants on HEK293T cells fixed with or without permeabilization analyzed by flow cytometry. Histograms are from one representative experiment out of two biological replicates. Geometric mean intensity f SD from two biological replicates is shown at the upper right comer of each histogram. Filled curves denote cells transfected with empty plasmids.

[0048] FIG. 18. FLAG tag insertion in the F ectodomain and its effect on protein bioreactivity. (A) Schematic drawings of uncleaved MeV-F and CDV-F. The NH₂ and COOH termini, signal peptide (SP), fusion peptide (FP), and transmembrane (TM) and cytoplasmic regions are indicated. The sequence surrounding the cleavage site (in bold) and that of the fusion peptide are shown. The numbering considers the homotypic signal peptides. (B) Syncytia formation in Vero cells after cotransfection of homologous H and F expression plasmids with FLAG insertions at different positions. Cells were stained at 16 hours post transfection, and microphotographs were acquired for quantification. (C) Quantification of syncytia formation. The data are shown as the mean±SD (n=20). Significance was determined using one-way ANOVA with Holm-Sidak's multiple comparison test (ns, not significant; ***, p<0.001). (D) Dual-split protein fusion assay for the cotransfection of CDV-H/F SPA with or without a FLAG-tag insertion at amino acid 216. The luciferase signal was measured at 8 hours. The experiment was performed in technical duplicates.

[0049] FIG. 19. CD46 specificity of scFvs. (A) SDS-PAGE analysis of target proteins. MW: molecular weight ladder, C: Coomassie staining; WB: western blot analysis using an anti-CD46 antibody. (B) Size exclusion chromatography trace for the CD46 used in the experiments. The estimated MW is from a calibration curve is indicated. (C) Binding of scFv-Fc tagged fusion proteins to CD46 or NECTIN4 as determined by ELISA. Detection was performed with the Fc portion used as a control for the amount of protein. Experiments were performed in technical duplicates. The data are shown as the mean ±SD n=2). Significance was determined using one-way ANOVA with Holm-Sidak's multiple comparison test. *, p<0.05; **, p<0.005.

[0050] FIG. 20. CD46 binding affinity of the displayed scFv determines CD46-dependent cell-to-cell fusion of the retargeted CDV H/F complex. (A) Representative sensogram (in resonance units, RU) for the binding of CD46 to biosensor surfaces containing (continuous line) or lacking (discontinuous line) single-chain antibody fragments (scFv). Experimental data represents the injection for 300s of scFv K2 followed by buffer injection. 1 μM of CD46 was subsequently flown over both biosensor surfaces and the signal was recorded during (association) and after injection (dissociation). The surfaces were finally regenerated at the end of the cycle as described herein. (B) Binding of CD46 to scFvs as assessed by surface plasmon resonance. Sensograms showing the response units (black lines) of various concentrations of CD46 to the scFvs. Best fit 1:1 binding model is shown as discontinuous red lines. Binding affinity (Kd) was determined from the association and dissociation rates (Table 1). (C) Quantitative fusion assay for the MeV-H and CDV-H variants on CHO cells. The experiment was carried out in duplicate and repeated twice with similar results (see FIG. 21). The data are shown as the mean f SD.

[0051] FIG. 21. Binding affinity of the scFv displayed onto the CDV-H/F complex drives enhanced cell-cell fusion. (A) Cellular enzyme-linked immunosorbent assay (CELISA) for the amount of cellular protein used in the quantitative fusion assay on FIG. 20C. A CELISA was performed on CHO cells transfected with the indicated attachment protein using an anti-6×HIS-tag monoclonal antibody (n=5). (B) Quantitative fusion assay for the CD46-retargeted CDV-H/F complex using affinity tuned scFvs (same data as presented in FIG. 20C). Y539A indicates the substitution in CDV-H to ablate the natural tropism for NECTIN4.

[0052] FIG. 22. CD46-retargeted CDV envelope glycoproteins determine virus tropism. (A) Schematic representation of Stealth: a vaccine-derived measles virus pseudotyped with CD46-retargeted CDV H/F envelope proteins. Created with BioRender.com. (B) Role of the CD46 binding affinity into virus entry. Cells were infected at the indicated MOI with Stealth viruses displaying scFv with different affinity to CD46, eGFP expression was monitored 48 h post infection. (C) CHO cells and derivates expressing the HIS-pseudoreceptor or CD46 were infected with Fluc-expressing Stealth viruses (K1 and A09) at MOI 0.5. Luciferase expression was measured 48 hours postinfection. n=2 except for CHO-CD46, *, p-value<0.05 (two-tailed t-test), (D) Multistep growth kinetics of Stealth-A09 in Vero or Vero-αHIS cells. At the indicated time-point, both the supernatant and the cell pellet were collected and virus titers were determined on Vero-αHIS cells. Values and error bars (SD) were determined for a representative experiment performed in triplicate. (E) Protein composition of viruses. Western blot analysis was determined with similar amounts of virus particles and probed with the relevant antibodies. The molecular weight of the standard is indicated. (F) Virus tropism. CHO cell derivatives were infected with the eGFP-expressing viruses as indicated. eGFP autofluorescence was determined 48 hours later. Scale bar, 200 pm. (G) Genetic stability of Stealth. Vero-hSLAMF1 cells were infected with Stealth and passaged multiple times. After 8 passages, the recovered virus was used to infect Vero cells expressing human or canine SLAMF1. Representative microphotographs are shown after infection for three or six days.

[0053] FIG. 23. Assessment of receptor interactions for the engineered CDV fusion apparatus complex. Cells were cotransfected with MeV-F and MeV-H or CDV-F and CDV-H retargeted variants with a CD46-specific scFv. For visualization purposes, an expression plasmid encoding eGFP was cotransfected, and eGFP autofluorescence was visualized at 24 hours post transfection. Y539A indicates the substitution in CDV-H to ablate the natural tropism for NECTIN4. “+” and “−” symbols were used for semiquantification (same as presented in FIG. 15A). “Undisplay” indicates no scFv.

[0054] FIG. 24. High CD46 binding affinity governs oncolytic activity of CD46-targeted Stealth virus in a mouse model of ovarian cancer. (A) Study schematic of the experimental design. SKVOv3ip.1 tumor cells encoding the firefly luciferase gene (SKOV3ip.Fluc) were implanted intraperitoneally into athymic mice. At day 10, 1×10⁶ TCID₅₀ particles of Stealth were administered following the same route. Tumor burden was then monitored at 7 days interval through bioluminescence imaging (BLI). (B) Kaplan-survival curves of SKOV3ip.Fluc-bearing mice treated with Stealth-N1E and Stealth-A09 viruses (n=5). Statistical significance defined by long-rank test. (C) Representative BLI showing the dorsal view of treated animals. Radiance (photons per second per cm per steradian, p/s/cm²/sr) was translated to colors to indicate tumor burden in the mice, according to the legend shown on the right. (D) Quantification of the total body luminescence in photons per second per cm per steradian (p/s/cm²/sr). n=5. Ns, not significant; *, p-value <0.05; **, p<0.005.

[0055] FIG. 25. Stealth-A09 virus achieves oncolysis indistinguisible from the parental MeV in a mouse model of multiple myeloma. (A) SCID mice bearing subcutaneous U266.B1 cell tumors were treated intravenously with a suboptimal dose of virus. Tumor growth was measured with a caliper (n=5), and animals were euthanized when the tumors ulcerated or when the tumor size reached 20% of the body weight. (B) Kaplan-Meier survival curves (n=5). Significant differences among the groups were determined by the long-rank test (*, p<0.05). (C) Virus trafficking to subcutaneous tumor cells after systemic administration. eGFP expression was evaluated by immunohistochemistry of two representative samples from each group collected at euthanasia. Scale, 200 nm.

[0056] FIG. 26. Increased binding affinity to CD46 enhances CD46-specific virus entry. Fluc-expressing Stealth viruses were used to infect the indicated cells at decreasing MOI. Luciferase expression was measured 48 hours post-infection. n=2 for all except CHO-CD46 and Stealth-A09 (n=3).

[0057] FIG. 27. Stealth virus remains oncolytic in the presence of MeV-immune serum. (A) SKOV3ip.Fluc cells were injected into athymic nude mice and allowed to establish for 10 days. Next, mice in the relevant groups received 600 mIU of anti-MeV IgG antibody intraperitoneally three hours before virus treatment via the same route. (B) Kaplan-Meier survival curves (n=5 mice per group). Significant differences among the groups were determined by the long-rank test (ns, not significant; *, p<0.05; **, p<0.002) (C) Representative BLI showing the dorsal view of treated animals. Radiance (photons per second per cm per steradian, p/s/cm²/sr) was translated to colors to indicate tumor burden in the mice, according to the legend shown on the right. (D) Quantification of the total body luminescence in photons per second per cm per steradian (p/s/cm²/sr). n=5. Statistical significance was determined by one-way ANOVA with Dunnetts' multiple comparison test. Ns, no significant.

[0058] FIG. 28. Lack of cross-neutralization between measles virus and Stealth. (A) Virus neutralization assay for MeV and Stealth. Human AB pooled serum (left panel) or ferret anti-CDV serum (right panel) was used. Relative infection refers to the amount of infection in the presence of serum compared with that in the absence of serum. Values were calculated from two or three biological replicates performed in technical quadruplicates. (B) Antisera from infected HuCD46Ge-IFNARKO mice was also used to determine the cross-neutralization between the viruses, n=8 (note that some data points overlap). ND₅₀ titers were converted to mIU/mL based on the ND₅₀ obtained for MeV when assessed with the 3rd WHO International serum standard (3 IU/mL).

### DETAILED DESCRIPTION

[0059] This document provides CDV F polypeptides. As described herein, a CDV F polypeptide can be designed such that virus particles containing the CDV F polypeptide together with a CDV H polypeptide exhibit enhanced fusogenic activity. For example, a CDV F polypeptide can be designed to contain a signal peptide sequence that is no longer than 75 amino acids in length. Typically, wild-type CDV F polypeptides contain a signal peptide sequence that is about 135 amino acids in length. An example of a 135 amino acid signal peptide sequence of a wild-type CDV F polypeptide is set forth in SEQ ID NO:6 (MHKEIPEKSRTRTHTQQDLPQQKSTEYTEIKTSRARHGITPAQRSTH YGPRTLDRLVCYIMNRAMSCKQASYRSDNIPAHGDHEGVVHHTPESVSQGARSQ LKRRTSNAINSGFQYIWLVLWCIGIASLFLCSKA). As described herein, truncating the signal peptide sequence of CDV F polypeptides such that it is no longer than 75 amino acids in length can result in CDV F polypeptides that, when part of viruses together with CDV H polypeptides, allow for increased fusogenic activity of the viruses as compared to the level of fusogenic activity exhibited by comparable control viruses containing a CDV F polypeptide having a full-length wild-type signal peptide sequence (e.g., SEQ ID NO:6).

[0060] A CDV F polypeptide provided herein can contain a signal peptide sequence that is from 7 amino acids to 75 amino acids in length. For example, a CDV F polypeptide provided herein can contain a signal peptide sequence that is from 7 to 75 (e.g., from 7 to 70, from 7 to 65, from 7 to 60, from 7 to 55, from 7 to 50, from 7 to 45, from 7 to 40, from 7 to 35, from 7 to 30, from 7 to 25, from 10 to 75, from 15 to 75, from 20 to 75, from 25 to 75, from 35 to 75, from 45 to 75, from 50 to 75, from 55 to 75, from 65 to 75, from 20 to 60, from 25 to 50, from 30 to 60, or from 30 to 40) amino acids in length. A CDV F polypeptide provided herein can be produced by truncating a wild-type signal peptide sequence from its N-terminus, from its C-terminus, or from both its N-terminus and C-terminus or by deleting amino acids from in between the N-terminal and C-terminal regions of a wild-type signal peptide sequence. In some cases, a measles virus signal peptide sequence can be used for a signal peptide of a CDV F polypeptide described herein. Examples of signal peptide sequences of CDV F polypeptides provided herein include, without limitation, those set forth in Table 1.

TABLE 1
Examples of signal peptide sequences.

| Ex- | | SEQ |
|---|---|---|
| ample | | ID |
| # | Sequence | NO: |
| 1 | MNRAMSCKQASYRSDNIPAHGDHEGVVHHTPESVSQG | 8 |
| | ARSQLKRRTSNAINSGFQYIWLVLWCIGIASLFLCSKA | |
| 2 | MTSNAINSGFQYIWLVLWCIGIASLFLCSKA | 9 |
| 3 | MSIMGLKVNVSAIFMAVLLTLQTPTG | 10 |
| 4 | MAINSGSQCTWLVLWCLGIASLFLCSKA | 11 |
| 5 | MAINSGSQCTWLVLWCLGMASLFLCSKA | 12 |
| 6 | MAINSGSQCTWLVLWCFGTASLFLCSKA | 13 |
| 7 | MATSPGPQCTWLVLWCIGIASLFLCSEA | 14 |
| 8 | MAVKSGSQCTWLVLWCIGVASLFLCSKA | 15 |
| 9 | MASNPGSQCTWLVLWCIGIASLFLCSKA | 16 |
| 10 | MATNAGSQYTWLVLWCIGIASLFLCSKA | 17 |
| 11 | MATSSGSQCTWLVLWCIGVASLFLCSKA | 18 |
| 12 | MAINSGSQCTWLVLWCIGVASLFLCSKA | 19 |
| 13 | MAINSGFQYIWLVLWCIGIASLFLCSKA | 20 |

[0061] In some cases, a CDV F polypeptide provided herein can be designed to lack the entire signal peptide sequence. For example, a CDV F polypeptide provided herein can have one of the amino acid sequences set forth in FIG. 13 starting with the amino acid at position 140.

[0062] A CDV F polypeptide provided herein can have any appropriate amino acid sequence provided that the CDV F polypeptide does not contain a signal peptide sequence longer than 75 amino acid residues in length. Examples of amino acid sequences of CDV F polypeptides that can be used as described herein include, without limitation, those amino acid sequences set forth in FIG. 13.

[0063] This document also provides CDV H polypeptides. As described herein, a CDV H polypeptide can be designed such that viruses containing the CDV H polypeptide together with a CDV F polypeptide exhibit reduced or eliminated tropism for SLAMF1 polypeptides and/or Nectin-4 polypeptides as compared to viruses containing wild-type CDV H polypeptides. For example, a CDV H polypeptide can be designed to contain a mutation at one or more (e.g., one, two, three, four, five, six, seven, eight, nine, ten, 11, 12, 13, 14, or 15) of amino acid positions 454, 460, 479, 494, 510, 520, 525, 526, 527, 528, 529, 537, 539, 547, and 548. Typically, viruses containing wild-type CDV H polypeptides (together with CDV F polypeptides) exhibit tropism for SLAMF1 polypeptides and Nectin-4 polypeptides such that the viruses infect SLAMF1-positive cells and Nectin-4-positive cells. As described herein, mutating one or more of amino acid positions P/S454, V/L/F460, L/F/W479, I494, I/L/V510, Y520, Y/N525, D/G526, I/V527, S/T528, R529, Y/D537, Y539, Y/F547, and Y/M548 of a CDV H polypeptide to a different amino acid (e.g., alanine) can reduce or eliminate the ability of viruses containing that CDV H polypeptide (together with a CDV F polypeptide) to infect SLAMF1-positive cells and/or Nectin-4-positive cells. Examples of CDV H polypeptides provided herein having reduced or eliminated tropism for SLAMF1 polypeptides and/or Nectin-4 polypeptides include, without limitation, those CDV H polypeptides set forth in FIG. 12 provided that the CDV H polypeptide contains a mutation of one or more (e.g., one, two, three, four, five, six, seven, eight, nine, ten, 11, 12, 13, 14, or 15) of WP/454, V/L/F460, L/F/W479, I494, I/L/N510, Y520, Y/N525, D/G526, I/V527, S/T528, R529, Y/D537, Y539,Y/F547, and Y/M548. Examples of mutations that can be used to make a CDV H polypeptide having reduced or eliminated tropism for SLAMF1 polypeptides and/or NectinS4 polypeptides include, without limitation, those set forth in Table 2. Examples of combinations of the mutations set forth in Table 2 that can be used to make a CDV H polypeptide having reduced or eliminated tropism for SLAMF1 polypeptides and/or Nectin-4 polypeptides include, without limitation, those set forth in Table 3.

TABLE 2
Examples of mutations that can be introduced into a CDV H
polypeptide (e.g., a CDV H polypeptide set forth in Figure 12).

| | | | Specific |
|---|---|---|---|
| Example # | Position | Amino acid change | examples |
| 1 | P454 | Any amino acid other than | A, I, L, M, F, W, |
| | | P and S | Y, V, R, H, K, D, |
| | | | E, S, T, N, Q, C, |
| | | | G or P |
| 2 | V/L/F460 | Any amino acid other than | A, I, M, F, W, Y, |
| | | V, L, and F | S, T, N, Q, C, G, |
| | | | P, R, H, K, D, or |
| | | | E |
| 3 | L/F/W479 | Any amino acid other than | A, I, M, Y, V, S, |
| | | L, F, and W | T, N, Q, C, G, P, |
| | | | R, H, K, D, E |
| 4 | I494 | Any amino acid other than | A, L M, F, W, Y, |
| | | I | V, S, T, N, Q, C, |
| | | | G, P, R, H, K, D, |
| | | | or E |
| 5 | I/L/V510 | Any amino acid other than | A, M, F, W, Y, S, |
| | | I, L, and V | T, N, Q, C, G, P, |
| | | | R, H, K, D, or E |
| 6 | Y520 | Any amino acid other than | A, I, L M, F, W, |
| | | Y | V, S, T, N, Q, C, |
| | | | G, P, R, H, K, D, |
| | | | or E |
| 7 | Y/N525 | Any amino acid other than | A, I, L M, F, W, |
| | | Y and N | V, S, T, Q, C, G, |
| | | | P, R, H, K, D, or |
| | | | E |
| 8 | D/G526 | Any amino acid other than | A, I, L M, F, W, |
| | | D and G | Y, V, S, T, N, Q, |
| | | | C, P, R, H, K, or |
| | | | E |
| 9 | I/V527 | Any amino acid other than | A, L M, F, W, Y, |
| | | I and V | S, T, N, Q, C, G |
| | | | P, R, H, K, D, or |
| | | | E |
| 10 | S/T528 | Any amino acid other than | A, I, L M, F, W, |
| | | S and T | Y, V, N, Q, C, G, |
| | | | P, R, H, K, D, or |
| | | | E |
| 11 | R529 | Any amino acid other than | A, I, L M, F, W, |
| | | R | Y, V, S, T, N, Q, |
| | | | C, G, P, H, K, D, |
| | | | or E |
| 12 | Y/D537 | Any amino acid other than | A, S, T, N, Q, G, |
| | | Y and D | C, P, D, R, H, K, |
| | | | or E |
| 13 | Y539 | Any amino acid other than | A, S, T, N, Q, G, |
| | | Y | C, P, D, E, R, H, |
| | | | K, or E |
| 14 | Y/F547 | Any amino acid other than | A, S, T, N, Q, G, |
| | | Y and F | C, P, D, E, R, H, |
| | | | K, or E |
| 15 | Y/M548 | Any amino acid other than | A, S, T, N, Q, G, |
| | | Y and M | C, P, D, E, R, H, |
| | | | K, or E |

TABLE 3
Examples of combinations of mutations from Table 2 that can be
included within a CDV H polypeptide.

| Combination # | Combination of mutations from Table 2 |
|---|---|
| 1 | All of 1-15 |
| 2 | 8, 9, 10, 11, 14, and 15 |
| 3 | 7, 8, and 11 |
| 4 | 7 and 8 |
| 5 | 7 and 11 |
| 6 | 8 and 11 |

[0064] This document also provides recombinant viruses (e.g., VSVs) containing a CDV H polypeptide provided herein and/or a CDV F polypeptide provided herein as well as methods for making recombinant viruses (e.g., VSVs) containing a CDV H polypeptide provided herein and/or a CDV F polypeptide provided herein. For example, a recombinant virus (e.g., VSV) can be designed to include (a) a CDV H polypeptide provided herein and a wild-type CDV F polypeptide, (b) a wild-type CDV H polypeptide and a CDV F polypeptide provided herein, or (c) a CDV H polypeptide provided herein and a CDV F polypeptide provided herein. In some cases, a recombinant virus (e.g., VSV) can be designed to include a CDV H polypeptide having CDV H 5804 and a CDV F polypeptide having CDV F 22458/16.

[0065] This document also provides nucleic acid molecules encoding a CDV H polypeptide provided herein and/or nucleic acid molecules encoding a CDV F polypeptide provided herein. For example, a nucleic acid molecule (e.g., a vector) can be designed to encode a CDV H polypeptide provided herein and/or a CDV F polypeptide provided herein.

[0066] This document provides methods and materials related to VSVs. For example, this document provides replication-competent VSVs, nucleic acid molecules encoding replication-competent VSVs, methods for making replication-competent VSVs, and methods for using replication-competent VSVs to treat cancer or infectious diseases.

[0067] As described herein, a VSV can be designed to have a nucleic acid molecule that encodes a VSV N polypeptide, a VSV P polypeptide, a VSV M polypeptide, a CDV F polypeptide (e.g., a CDV F polypeptide provided herein), a CDV H polypeptide (e.g., a CDV H polypeptide provided herein), and a VSV L polypeptide, and does not encode a functional VSV G polypeptide. It will be appreciated that the sequences described herein with respect to a VSV are incorporated into a plasmid coding for the positive sense cDNA of the viral genome allowing generation of the negative sense genome of VSVs. Thus, it will be appreciated that a nucleic acid sequence that encodes a VSV polypeptide, for example, can refer to an RNA sequence that is the template for the positive sense transcript that encodes (e.g., via direct translation) that polypeptide.

[0068] The nucleic acid encoding the CDV F polypeptide and the CDV H polypeptide can be positioned at any location within the VSV genome. In some cases, the nucleic acid encoding the CDV F polypeptide and the CDV H polypeptide can be positioned downstream of the nucleic acid encoding the VSV M polypeptide. For example, nucleic acid encoding a CDV F polypeptide and nucleic acid encoding a CDV H polypeptide can be positioned between nucleic acid encoding a VSV M polypeptide and nucleic acid encoding a VSV L polypeptide.

[0069] Any appropriate nucleic acid encoding a CDV F polypeptide can be inserted into the genome of a VSV. For example, nucleic acid encoding a wild-type CDV F polypeptide or a CDV F polypeptide provided herein can be inserted into the genome of a VSV.

[0070] Any appropriate nucleic acid encoding a CDV H polypeptide can be inserted into the genome of a VSV. For example, nucleic acid encoding a wild-type H polypeptide or a H polypeptide provided herein can be inserted into the genome of a VSV. In some cases, nucleic acid encoding a CDV H polypeptide that lacks specificity for SLAMF1 and/or Nectin-4 can be inserted into the genome of a VSV. For example, nucleic acid encoding a CDV H polypeptide having one or more mutations set forth in Table 2 can be inserted into the genome of a VSV. In some cases, a VSV/CDV hybrid provided herein can be designed to have a preselected tropism. For example, CDV F and/or H polypeptides having knocked out specificity for SLAMF1 and/or Nectin-4 can be used such that a scFv or polypeptide ligand can be attached to, for example, the C-terminus of the CDV H polypeptide. In such cases, scFv or polypeptide ligand can determine the tropism of a VSV/CDV hybrid. Examples of scFvs that can be used to direct VSV/CDV hybrids to cellular receptors (e.g., tumor associated cellular receptors) include, without limitation, anti-EGFR, anti-CD46, anti-αFR, anti-PSMA, anti-HER-2, anti-CD19, anti-CD20, or anti-CD38 scFvs. Examples of polypeptide ligands that can be used to direct VSV/CDV hybrids include, without limitation, urokinase plasminogen activator uPA polypeptides, cytokines such as IL-13, single chain T cell receptors (scTCRs), echistatin polypeptides, and integrin binding polypeptides.

[0071] In some cases, the nucleic acid molecule of VSV provided herein can encode an IFN polypeptide, a fluorescent polypeptide (e.g., a GFP polypeptide), a NIS polypeptide, a therapeutic polypeptide, an innate immunity antagonizing polypeptide, a tumor antigen, or a combination thereof. Nucleic acid encoding an IFN polypeptide can be positioned downstream of nucleic acid encoding a VSV M polypeptide. For example, nucleic acid encoding an IFN polypeptide can be positioned between nucleic acid encoding a VSV M polypeptide and nucleic acid encoding a CDV F polypeptide or nucleic acid encoding a CDV H polypeptide. Such a position can allow the viruses to express an amount of IFN polypeptide that is effective to activate anti-viral innate immune responses in non-cancerous tissues, and thus alleviate potential viral toxicity, without impeding efficient viral replication in cancer cells.

[0072] Any appropriate nucleic acid encoding an IFN polypeptide can be inserted into the genome of a VSV. For example, nucleic acid encoding an IFN beta polypeptide can be inserted into the genome of a VSV. Examples of nucleic acid encoding IFN beta polypeptides that can be inserted into the genome of a VSV include, without limitation, nucleic acid encoding a human IFN beta polypeptide of the nucleic acid sequence set forth in GenBank® Accession No. NM_002176.2 (GI No. 50593016), nucleic acid encoding a mouse IFN beta polypeptide of the nucleic acid sequence set forth in GenBank® Accession Nos. NM_010510.1 (GI No. 6754303), BC119395.1 (GI No. 111601321), or BC119397.1 (GI No. 111601034), and nucleic acid encoding a rat IFN beta polypeptide of the nucleic acid sequence set forth in GenBank® Accession No. NM_019127.1 (GI No. 9506800).

[0073] Nucleic acid encoding a NIS polypeptide can be positioned downstream of nucleic acid encoding a CDV F polypeptide or nucleic acid encoding a CDV H polypeptide. For example, nucleic acid encoding a NIS polypeptide can be positioned between nucleic acid encoding a CDV F or H polypeptide and nucleic acid encoding a VSV L polypeptide. Such a position of can allow the viruses to express an amount of NIS polypeptide that (a) is effective to allow selective accumulation of iodide in infected cells, thereby allowing both imaging of viral distribution using radioisotopes and radiotherapy targeted to infected cancer cells, and (b) is not so high as to be toxic to infected cells.

[0074] Any appropriate nucleic acid encoding a NIS polypeptide can be inserted into the genome of a VSV. For example, nucleic acid encoding a human NIS polypeptide can be inserted into the genome of a VSV. Examples of nucleic acid encoding NIS polypeptides that can be inserted into the genome of a VSV include, without limitation, nucleic acid encoding a human NIS polypeptide of the nucleic acid sequence set forth in GenBank® Accession Nos. NM_000453.2 (GI No. 164663746), BC105049.1 (GI No. 85397913), or BC105047.1 (GI No. 85397519), nucleic acid encoding a mouse NIS polypeptide of the nucleic acid sequence set forth in GenBank® Accession Nos. NM_053248.2 (GI No. 162138896), AF380353.1 (GI No. 14290144), or AF235001.1 (GI No. 12642413), nucleic acid encoding a chimpanzee NIS polypeptide of the nucleic acid sequence set forth in GenBank® Accession No. XM_524154 (GI No. 114676080), nucleic acid encoding a dog NIS polypeptide of the nucleic acid sequence set forth in GenBank® Accession No. XM_541946 (GI No. 73986161), nucleic acid encoding a cow NIS polypeptide of the nucleic acid sequence set forth in GenBank® Accession No. XM_581578 (GI No. 297466916), nucleic acid encoding a pig NIS polypeptide of the nucleic acid sequence set forth in GenBank® Accession No. NM_214410 (GI No. 47523871), and nucleic acid encoding a rat NIS polypeptide of the nucleic acid sequence set forth in GenBank® Accession No. NM_052983 (GI No. 158138504).

[0075] The nucleic acid sequences of a VSV provided herein that encode a VSV N polypeptide, a VSV P polypeptide, a VSV M polypeptide, and a VSV L polypeptide can be from a VSV Indiana strain as set forth in GenBank® Accession Nos. NC_001560 (GI No. 9627229) or can be from a VSV New Jersey strain.

[0076] In one aspect, this document provides VSVs containing a nucleic acid molecule (e.g., an RNA molecule) having (e.g., in a 3′ to 5′ direction) a nucleic acid sequence that is a template for a positive sense transcript encoding a VSV N polypeptide, a nucleic acid sequence that is a template for a positive sense transcript encoding a VSV P polypeptide, a nucleic acid sequence that is a template for a positive sense transcript encoding a VSV M polypeptide, a nucleic acid sequence that is a template for a positive sense transcript encoding a CDV F polypeptide, a nucleic acid sequence that is a template for a positive sense transcript encoding a CDV H polypeptide, and a nucleic acid sequence that is a template for a positive sense transcript encoding a VSV L polypeptide while lacking a nucleic acid sequence that is a template for a positive sense transcript encoding a functional VSV G polypeptide. Such VSVs can infect cells (e.g., cancer cells) and be replication-competent.

[0077] Any appropriate method can be used to insert nucleic acid (e.g., nucleic acid encoding a CDV F polypeptide, nucleic acid encoding a CDV H polypeptide, nucleic acid encoding an IFN polypeptide, and/or nucleic acid encoding a NIS polypeptide) into the genome of a VSV. For example, the methods described elsewhere (Schnell et. al., PNAS, 93:11359-11365 (1996), Obuchi et al., J. Virol., 77(16):8843-56 (2003)); Goel et al., Blood, 110(7):2342-50 (2007)); and Kelly et al., J. Virol., 84(3):1550-62 (2010)) can be used to insert nucleic acid into the genome of a VSV. Any appropriate method can be used to identify VSVs containing a nucleic acid molecule described herein. Such methods include, without limitation, PCR and nucleic acid hybridization techniques such as Northern and Southern analysis. In some cases, immunohistochemistry and biochemical techniques can be used to determine if a VSV contains a particular nucleic acid molecule by detecting the expression of a polypeptide encoded by that particular nucleic acid molecule.

[0078] In another aspect, this document provides nucleic acid molecules that encode a VSV N polypeptide, a VSV P polypeptide, a VSV M polypeptide, a CDV F polypeptide, a CDV H polypeptide, and a VSV L polypeptide, while lacking the ability to encode a functional VSV G polypeptide. For example, a nucleic acid molecule provided herein can be a single nucleic acid molecule that includes a nucleic acid sequence that encodes a VSV N polypeptide, a nucleic acid sequence that encodes a VSV P polypeptide, a nucleic acid sequence that encodes a VSV M polypeptide, a nucleic acid sequence that encodes a CDV F polypeptide, a nucleic acid sequence that encodes a CDV H polypeptide, and a nucleic acid sequence that encodes a VSV L polypeptide, while lacking a nucleic acid sequence that encodes a functional VSV G polypeptide.

[0079] In another aspect, this document provides nucleic acid molecules that encode a VSV N polypeptide, a VSV P polypeptide, a VSV M polypeptide, an IFN polypeptide, a CDV F polypeptide, a CDV H polypeptide, a NIS polypeptide, and a VSV L polypeptide, while lacking the ability to encode a functional VSV G polypeptide. For example, a nucleic acid molecule provided herein can be a single nucleic acid molecule that includes a nucleic acid sequence that encodes a VSV N polypeptide, a nucleic acid sequence that encodes a VSV P polypeptide, a nucleic acid sequence that encodes a VSV M polypeptide, a nucleic acid sequence that encodes an IFN polypeptide, a nucleic acid sequence that encodes a CDV F polypeptide, a nucleic acid sequence that encodes a CDV H polypeptide, a nucleic acid sequence that encodes a NIS polypeptide, and a nucleic acid sequence that encodes a VSV L polypeptide, while lacking the ability to encode a functional VSV G polypeptide.

[0080] The term “nucleic acid” as used herein encompasses both RNA (e.g., viral RNA) and DNA, including cDNA, genomic DNA, and synthetic (e.g., chemically synthesized) DNA. A nucleic acid can be double-stranded or single-stranded. A single-stranded nucleic acid can be the sense strand or the antisense strand. In addition, a nucleic acid can be circular or linear.

[0081] This document also provides method for treating cancer (e.g., to reduce tumor size, inhibit tumor growth, or reduce the number of viable tumor cells), methods for inducing host immunity against cancer, and methods for treating an infectious disease such as HIV or measles. For example, a recombinant virus (e.g., a VSV) provided herein can be administered to a mammal having cancer to reduce tumor size, to inhibit cancer cell or tumor growth, to reduce the number of viable cancer cells within the mammal, and/or to induce host immunogeneic responses against a tumor. A recombinant virus (e.g., a VSV) provided herein can be propagated in host cells in order to increase the available number of copies of that virus, typically by at least 2-fold (e.g., by 5- to 10-fold, by 50- to 100-fold, by 500- to 1,000-fold, or even by as much as 5,000- to 10,000-fold). In some cases, a recombinant virus (e.g., a VSV) provided herein can be expanded until a desired concentration is obtained in standard cell culture media (e.g., DMEM or RPMI-1640 supplemented with 5-10% fetal bovine serum at 37° C. in 5% CO₂). A viral titer typically is assayed by inoculating cells (e.g., Vero cells) in culture.

[0082] Recombinant viruses (e.g., VSVs) provided herein can be administered to a cancer patient by, for example, direct injection into a group of cancer cells (e.g., a tumor) or intravenous delivery to cancer cells. A recombinant virus (e.g., a VSV) provided herein can be used to treat different types of cancer including, without limitation, myeloma (e.g., multiple myeloma), melanoma, glioma, lymphoma, mesothelioma, and cancers of the lung, brain, stomach, colon, rectum, kidney, prostate, ovary, breast, pancreas, liver, and head and neck.

[0083] Recombinant viruses (e.g., VSVs) provided herein can be administered to a patient in a biologically compatible solution or a pharmaceutically acceptable delivery vehicle, by administration either directly into a group of cancer cells (e.g., intratumorally) or systemically (e.g., intravenously). Suitable pharmaceutical formulations depend in part upon the use and the route of entry, e.g., transdermal or by injection. Such forms should not prevent the composition or formulation from reaching a target cell (i.e., a cell to which the virus is desired to be delivered to) or from exerting its effect For example, pharmacological compositions injected into the blood stream should be soluble.

[0084] While dosages administered will vary from patient to patient (e.g., depending upon the size of a tumor), an effective dose can be determined by setting as a lower limit the concentration of virus proven to be safe and escalating to higher doses of up to 10¹² pfu, while monitoring for a reduction in cancer cell growth along with the presence of any deleterious side effects. A therapeutically effective dose typically provides at least a 10% reduction in the number of cancer cells or in tumor size. Escalating dose studies can be used to obtain a desired effect for a given viral treatment (see, e.g., Nies and Spielberg, “Principles of Therapeutics,” In Goodman & Gilman's The Pharmacological Basis of Therapeutics, eds. Hardman, et al., McGraw-Hill, N Y, 1996, pp 43-62).

[0085] Recombinant viruses (e.g., VSVs) provided herein can be delivered in a dose ranging from, for example, about 10³ pfu to about 10¹² pfu (e.g., about 10⁵ pfu to about 10¹² pfu, about 10⁶ pfu to about 10¹¹ pfu, or about 10⁶ pfu to about 10¹⁰ pfu). A therapeutically effective dose can be provided in repeated doses. Repeat dosing is appropriate in cases in which observations of clinical symptoms or tumor size or monitoring assays indicate either that a group of cancer cells or tumor has stopped shrinking or that the degree of viral activity is declining while the tumor is still present. Repeat doses can be administered by the same route as initially used or by another route. A therapeutically effective dose can be delivered in several discrete doses (e.g., days or weeks apart) and in one embodiment, one to about twelve doses are provided. Alternatively, a therapeutically effective dose of recombinant viruses (e.g., VSVs) provided herein can be delivered by a sustained release formulation. In some cases, a recombinant virus (e.g., a VSV) provided herein can be delivered in combination with pharmacological agents that facilitate viral replication and spread within cancer cells or agents that protect non-cancer cells from viral toxicity. Examples of such agents are described elsewhere (Alvarez-Breckenridge et al., Chem. Rev., 109(7):3125-40 (2009)).

[0086] Recombinant viruses (e.g., VSVs) provided herein can be administered using a device for providing sustained release. A formulation for sustained release of recombinant viruses (e.g., VSVs) provided herein can include, for example, a polymeric excipient (e.g., a swellable or non-swellable gel, or collagen). A therapeutically effective dose of recombinant viruses (e.g., VSVs) provided herein can be provided within a polymeric excipient, wherein the excipient/virus composition is implanted at a site of cancer cells (e.g., in proximity to or within a tumor). The action of body fluids gradually dissolves the excipient and continuously releases the effective dose of virus over a period of time. Alternatively, a sustained release device can contain a series of alternating active and spacer layers. Each active layer of such a device typically contains a dose of virus embedded in excipient, while each spacer layer contains only excipient or low concentrations of virus (i.e., lower than the effective dose). As each successive layer of the device dissolves, pulsed doses of virus are delivered. The size/formulation of the spacer layers determines the time interval between doses and is optimized according to the therapeutic regimen being used.

[0087] In some cases, recombinant viruses (e.g., VSVs) provided herein can be directly administered. For example, a virus can be injected directly into a tumor (e.g., a breast cancer tumor) that is palpable through the skin. Ultrasound guidance also can be used in such a method. Alternatively, direct administration of a virus can be achieved via a catheter line or other medical access device, and can be used in conjunction with an imaging system to localize a group of cancer cells. By this method, an implantable dosing device typically is placed in proximity to a group of cancer cells using a guidewire inserted into the medical access device. An effective dose of a recombinant virus (e.g., a VSV) provided herein can be directly administered to a group of cancer cells that is visible in an exposed surgical field.

[0088] In some cases, recombinant viruses (e.g., VSVs) provided herein can be delivered systemically. For example, systemic delivery can be achieved intravenously via injection or via an intravenous delivery device designed for administration of multiple doses of a medicament. Such devices include, but are not limited to, winged infusion needles, peripheral intravenous catheters, midline catheters, peripherally inserted central catheters, and surgically placed catheters or ports.

[0089] The course of therapy with a recombinant virus (e.g., a VSV) provided herein can be monitored by evaluating changes in clinical symptoms or by direct monitoring of the number of cancer cells or size of a tumor. For a solid tumor, the effectiveness of virus treatment can be assessed by measuring the size or weight of the tumor before and after treatment. Tumor size can be measured either directly (e.g., using calipers), or by using imaging techniques (e.g., X-ray, magnetic resonance imaging, or computerized tomography) or from the assessment of non-imaging optical data (e.g., spectral data). For a group of cancer cells (e.g., leukemia cells), the effectiveness of viral treatment can be determined by measuring the absolute number of leukemia cells in the circulation of a patient before and after treatment. The effectiveness of viral treatment also can be assessed by monitoring the levels of a cancer specific antigen. Cancer specific antigens include, for example, carcinoembryonic antigen (CEA), prostate specific antigen (PSA), prostatic acid phosphatase (PAP), CA 125, alpha-fetoprotein (AFP), carbohydrate antigen 15-3, and carbohydrate antigen 19-4.

[0090] The invention will be further described in the following examples, which do not limit the scope of the invention described in the claims.

### EXAMPLES

### Example 1—CDV F and H polypeptides and recombinant viruses

### Cell Lines

[0091] Vero African green monkey kidney cells (Vero; American type culture collection [ATCC], Cat. #CCL-81) and their derivatives (either expressing Nectin-4 (Noyce et al., Virology, 436(1):210-20 (2013)), SLAMF1 (Tatsuo et al., Nature, 406(6798):893-7 (2000)), dog SLAMF1 (von Messling et al., J. Virol., 77(23):12579-91 (2003)), or a membrane-anchored single-chain antibody specific for a hexahistidine peptide (SEQ ID NO: 21) (Nakamura et al., Nat. Biotechnol., 23(2):209-14 (2005)) were kept in Dulbecco's modified Eagle's medium (DMEM) (GE Healthcare Life Sciences, Cat. #SH30022.01) supplemented with 5% (vol./vol.) heat-inactivated fetal bovine serum (FBS, Gibco) and 0.5 mg/mL of Geneticin (G418; Coming) for Vero/NECTIN-4 and Vero/SLAMF1 or 1 mg/mL Zeocin (ThermoFisher) for Vero/dogSLAMF1. Human kidney epithelial cells (HEK293T) cells, obtained from Dr. Cosset (Universitd de Lyon), baby hamster kidney cells (BHK, ATCC, Cat. #CCL-10), human glioblastoma U-87 MG cells ((ATCC, Cat. #HTB-14), and SKOV3ip.1 human ovarian tumor cells were maintained in DMEM plus 10% FBS. Chinese hamster ovary cells (CHO) cells, CHO-CD46, and CHO-EGFR (Nakamura et al., Nat. Biotechnol., 22(3):331-6 (2004)), CHO-SLAMF1 (Tatsuo et al., Nature, 406(6798):893-7 (2000)), CHO-dogSLAMF1 (Seki et al., J. Virol., 77(18):9943-50 (2003)), CHO-NECTIN4 (Liu et al., J. Virol., 88(4):2195-204 (2014)), CHO-CD38 (Peng et al. Blood, 101:2557-62 (2003), CHO-HER2/neu (Hasegawa et al., J. Virol., 81(23): 13149-57 (2007), Burkitt's B cell lymphoma Ramos (ATCC, Cat. #CRL-1596), and Raji cells (ATCC, Cat. #CCL-86) were cultured in Roswell Park Memorial Institute (RPMI) 1640 medium (Corning Inc., Cat. #10-040-CV, Coming, NY, United States) as described elsewhere.

Plasmids and Construction of Full-Genome rMeV

[0092] To generate CDV 22458/16 expression plasmids, total RNA was extracted from CDV 22458/16 isolate-infected Vero/dog SLAMF1 cells (passage 1) using RNeasy Mini Kit (Qiagen, Hilden, Germany). Both CDV-H and CDV-F genes were reverse transcribed with SuperScript III Reverse Transcriptase (Thermo Fisher Scientific, Cat.#11752050) and amplified by PCR with the following primers:

CDVH7050(+):
(SEQ ID NO: 22)
AGAAAACTTAGGGCTCAGGTAGTCC
CDVH8949(−):
(SEQ ID NO: 23)
TCGTCTGTAAGGGATTTCTCACC
CDVF4857(+):
(SEQ ID NO: 24)
AGGACATAGCAAGCCAACAGG
CDVH7050(−):
(SEQ ID NO: 25)
GGACTACCTGAGCCCTAAGTTTTCT

[0093] PCR products were sequenced directly by Sanger (Genewiz, Plainfield NJ, USA) and cloned into pJET1.2 vector (Thermo Fisher). CDV H open reading frame (FIG. 8) was next PCR amplified with a forward primer (5′-CCG GTA GTT AAT TAA AAC TTA GGG TGC AAG ATC ATC GAT AAT GCT CTC CTA CCA AGA TAA GGT G-3′ (SEQ ID NO: 26)) and a reverse primer (5′-CTA TTT CAC ACT AGT GGG TAT GCC TGA TGT CTG GGT GACATC ATG TGA TTG GTT CAC TAG CAG CCT CAA GGT TTT GAA CGG TTA CAG GAG-3′ (SEQ ID NO: 27)) and cloned into the PacI and SpeI (New England Biolabs, Iswich MA, USA) restricted pCG vector (Cathomen et al., J. Virol., 72(2):1224-34 (1998)) using the In Fusion HD kit (Takara, Shinagawa, Tokyo, Japan). The primers provided the PacI and SpeI restriction sites (underlined, respectively) as well as the MeV-H untranslated region of MeV-H (italic). Similarly, a CDV F open reading frame (FIG. 9; amino acid residues 136-662 of SEQ ID NO:4) was cloned into HpaI/SpeI restricted pCG-CDV-F plasmid (von Messling et al., J. Virol., 75(14):6418-27 (2001)). The resulting plasmid pCG-CDV F 22458/16 possesses the MeV-F untranslated region and the MeV-F signal peptide.

[0094] Expression plasmids for CDV H/F Onderstepoort vaccine and 5804 isolate (von Messling et al., J. Virol., 75(14):6418-27 (2001)), as well as the MeV Nse are described elsewhere (Cathomen et al., J. Virol., 72(2):1224-34 (1998)). Retargeted versions of the H protein were generated by inserting the homologous PacI/SfiI-digested PCR product into the pTNH6 vectors (Nakamura et al., Nat. Biotechnol., 23(2):209-14 (2005); and Nakamura et al., Nat. Biotechnol., 22(3):331-6 (2004)). Site-directed mutagenesis (QuickChange Site-Directed Mutagenesis Kit, Agilent Technologies, Santa Clara CA, USA) was used to ablate tropism in H as well as to remove a SpeI site in CDV-F and to introduce truncations in the cytoplasmic tails.

[0095] Envelope-exchange rMeVs were produced by shuttling the PacI/SpeI and NarI/PacI region of the corresponding expression plasmids. Rescue of rMeVs was carried out employing the START system (Nakamura et al., Nat. Biotechnol., 23(2):209-14 (2005)).

### Protein Expression

[0096] Cells were transfected using Fugene HD (PROMEGA, Fitchburg WI, USA) or TransIT-LT1 transfection reagent (Mirus Bio LLC, Madison WI, USA). For quantitative fusion assay, the dual-split reporter system (Kondo et al., J. Biol. Chem., 285(19):14681-8 (2010); and Ishikawa et al., Protein Eng. Des. Sel., 25(12):813-20 (2012)) was used as described elsewhere (Muñoz-Alia et al., Viruses, 11(8), pii: E688, doi: 0.3390/v11080688 (2019)), using BHK cells as effector cells. For semiquantitative assessment of fusion, Vero cells and derivates were transfected with 1 μg each of H and F expression plasmids and stained 1 day later with Hema-Quik (Thermo Fisher Scientific, Cat. #123-745). Images were obtained with a microscope (Eclipse Ti-S; Nikon) at 4× magnification. Alternatively, a GFP expression plasmid was included for additional visualization of syncytia formation. For assessment of the level of H polypeptide, transfected cells were analyzed by flow cytometry or CELISA using a 6×His tag monoclonal antibody (Miltenyi Biotec, Cat. #130-120-787 or Thermo Fisher Scientific, Cat. #MA1-135), as described elsewhere (Muñoz-Alia et al., Viruses, 11(8), pii: E688, doi: 10.3390/v11080688 (2019); and Saw et al., Methods, 90:68-75 (2015)). For total protein expression by flow cytometry, cells were treated with eBioscience Intracellular Fixation & Permeabilization buffer (Thermofisher, Cat. #88-8823-88).

### Virus Protein Content

[0097] Virus preparations were heated in the presence of dithiothreitol, fractionated into 4-12% Bis-Tris polyacrylamide gel, and transferred to polyvinylidene fluoride membranes. Blots were analyzed with anti-MeV-Hcyt (Cathomen et al., J. Virol., 72(2):1224-34 (1998)), anti-MeV-N(Toth et al., J. Virol., 83(2):961-8 (2009)), or anti-His tag (Genscript, Piscataway NJ, USA, Cat. #A01857-40) antibodies and probed with a conjugated secondary rabbit antibody (ThermoFisher, Cat. #31642). The blots were incubated with SuperSignal Wester Pico chemiluminescent substrate (ThermoFisher) and analyzed with a ChemiDoc Imaging Sytem (Bio-Rad).

### Neutralization Assays

[0098] A fluorescence focus reduction neutralization assay was used as described elsewhere (Munoz-Alia et al., J. Virol., 91(11): e00209-17 (2017)). The polyclonal Anti-Canine Distemper Virus, Lederle Avirulent (antiserum, Ferret), was obtained through BEI resources (NR-4025). The human sera used was pooled from 60 to 80 donors who were specifically blood type AB (Valley Biomedical Products & Services, Inc, Cat. #HS1017, Lot #C80553).

### Results

### Engineering a Fusogenic CDV H/F Complex

[0099] CDV envelope glycoproteins share a 36% (H polypeptide) and 66% (F polypeptide) amino acid homology with those of MeV. The open reading frame for the H and F polypeptides were obtained from a first-passage wild-type CDV isolate SPA.Madrid/22458/16 (CDV 22458/16) from post-mortem tissues from moribund dog (SPA.Madrid/22458/16). Maximum-likelihood phylogenetic analysis of fill-length hemagglutinin genes showed that CDV H polypeptide of 22458/16 grouped within the artic clade (FIG. 1). Co-transfection of H/F complexes from 22458/16 revealed fusion activity only when the SLAMF1 receptor was present (FIG. 2A). A lack of fusion activity on Nectin-4-expressing cells was observed. Co-expression of a heterotypic wild type CDV H polypeptide of 5804 with CDV F polypeptide of 22458/16 resulted in noticeable syncytia formation in Vero cells expressing Nectin-4. On the other hand, H/F complexes from the large-plaque forming variant of the Onderstepoort vaccine strain resulted in large syncytia formation regardless of the expression of Nectin-4 and SLAMF1.

[0100] Using a reporter gene to more accurately identify syncytia formation, the above fusogenic phenotype was confirmed for the heterotypic wild-type combination CDV H₅₈₀₄ polypeptide and CDV F_{22458/16} polypeptide (FIG. 2B). Although the lack of syncytia formation for the homotypic H/F₅₈₀₄ could be attribute to the presence of the native 135 amino acid-long signal peptide, the distinct fusogenic phenotype observed for CDV H/F_{22458/16}, which induced cell-to-cell fusion exclusively in a SLAMF1-dependent manner, was studied further. The clone used for CDV H_{22458/16} polypeptide was found to contain an amino acid change with regard to the consensus sequence (M437L). This clone was used to create a clone encoding a CDV H_{22458/16} polypeptide with position 437 changed from a leucine to a methionine.

### Tropism Expansion of CDV Fusion Apparatus

[0101] Since co-transfection of wild-type CDV H/F complexes, but not the Ondertepoort vaccine-derived H/F, resulted in syncytia formation in a specific receptor-dependent manner, the following was performed to determine whether receptor usage could be expanded to alternative receptors. As a target receptor, CD38 was chosen and for this purpose a CD38-specific scFv was displayed at the carboxy-terminal domain of the attachment protein (FIG. 2C). For comparison purposes, the analysis included the MeV H polypeptide as well as the Nipah G polypeptide. Results presented in FIG. 2D demonstrate that the different constructs were expressed on the surface at comparable levels. Of note, the L437M substitution of CDV H_{22458/16} did not seem to affect cell surface expression. Next, fusion proficiency was compared in a quantitative manner using the self-associating split luciferase assay described elsewhere (Kondo et al., J. Biol. Chem., 285:14681-14688 (2010); and Ishikawa et al., Protein Eng. Des. Sel., 25:813-820 (2012)). In this assay (FIG. 2E), effector cells were transfected with expression plasmids for the H/F complex and one half of the dual split GFP/Renilla luciferase protein (DSP1-7). Similarly, target cells expressing the relevant receptor were transfected with the other half (DSP8-12). Upon content mixing, the otherwise nonfunctional halves of the GFP/Renilla luciferase protein associate, and the activity measured. The results of this experiment with effector cells expressing different H or G/F complexes are shown in FIG. 2F. Whereas no fusion activity was observed when using the parental CHO cell line, fusion activity was evident on CHO cells engineered to stably express either a HIS-specific scFv (CHO-HIS) or CD38 molecule. In general, activity levels were more evident when using CD38 targeting versus the pseudoreceptor system 6×His-anti-6×HIS scFv. These differences were more noticeable when Nipah G^{αCD38} was used. The fusion capacity of the former was significantly reduced in comparison with the heterotypic CDV H₅₈₀₄^{αCD38} polypeptide/CDV F_{22458/16} polypeptide or the homotypic H/F from the Onderstepoort strain. Strikingly, the L437M substitution on CDV H_{22458/16} polypeptide drastically changed the fusogenic phenotype of the polypeptide, even when no differences at the expression levels were observed (FIG. 2G). This new fusogenic capacity was now equivalent to that obtained with homotypic CDV H/F from 5804, only when the signal peptide of the CDV F₅₈₀₄ polypeptide was replaced by a shorter MeV F signal peptide. Nevertheless, the fusion levels for the heterotypic combination of CDV H₅₈₀₄ ^{αCD38} polypeptide/CDV F_{22458/16} polypeptide were superior and similar to those obtained by the large-plaque forming variant of the Onderstepoort. These results demonstrate not only that the CDV fusion apparatus can be engineered to use alternative receptors, but also that a hyperfusogenic phenotype can be obtained from a heterotypic combination of H/F complexes from different CDV strains in a receptor-dependent manner. This enhanced fusogenic capacity for the CDV H/F complex was achieved by shortening of the signal peptide of the CDV F polypeptide and by using a CDV polypeptide having M437.

### Receptor Targeting

[0102] The CDV H polypeptides described in the preceding paragraph could still use human Nectin-4 as a receptor. To disrupt a Nectin-4 interaction, nucleic acid encoding a CDV H polypeptide containing a Y539A mutation was produced. FIG. 2H shows that the CDV H^{αCD38} polypeptide including the Y539A point mutation (CDVH_{Y539A}^{αCD38}) lost fusion activity on human Nectin-4 cells, but it was still able to induce fusion on CHO-HIS (CDV HY_{539A}^{αCD388} and CDV H_{Y539A}) and CHO-CD38 (CDV H_{Y539A}^{αCD388}) cells. This fusion activity was comparable to that obtained by a fully-retargeted MeV H polypeptide (MeV Haals^{αCD38} and MeV Haals^{αCD38}). These results demonstrate that the CDV H/F complex can be efficiently retargeted to specific receptors.

### Impact of Ligand-Binding Affinity on CDV H/F Driven Cell-to-Cell Fusion

[0103] To assess whether differences in the binding affinity of the ligand displayed to the ectodomain of the CDV H polypeptide influenced fusogenicity, Her2/neu-specific scFv binders as well as affibodies molecules (Hasegawa et al. J. Virol., 81(23): 13149-57 (2007); Wikman et al. Protein Eng. Des. Sel., 17(5):455-62 (2004); and Orlova et al. Cancer Res., 66(8):4339-48 (2006)) were displayed. FIG. 21 shows that binding affinities higher than 1 nM were necessary to trigger fusion on CHO cells engineered to stably express Her2/neu molecules, but not in the parental cell line. This was true independently of the nature of the binder, whether it was in the form of a scFv or an affibody molecule. To investigate the relationship between the receptor density and binder affinity, the quantitative fusion assay was repeated with an array of cancer cell lines expressing different levels of Her2/neu molecules on the surface: HT1080 (1.2×10⁴), Sko3pi (1.5×10⁵), and TET67L (4.3×10³). Whereas display of the affibody with the highest binding affinity (Z342, 0.022 nM) enabled CDV H to trigger fusion in all cell lines tested regardless of the receptor density, Z4 (50 nM) enabled intercellular fusion only in Skov3pi cells, which expressed the highest receptor density. These results demonstrate that there is an interplay between the binder-affinity and the receptor density on the target cell: lower receptor densities being effect with higher binder affinities.

### CD46-Targeted CDV t F Complexes can Overcome Neutralization-Sensitivity of Oncolytic Measles Virus

[0104] Different CD46-specific scFv binders were displayed on CDV H polypeptides in an attempt to obtain scFv-CDV H polypeptides supporting a similar fusion level to those of a MeV H Nse strain Cell surface expression levels were compared (FIG. 3A). A cellular enzyme-linked immunosorbent assay (CELISA) showed that both untargeted MeV H polypeptides and CDV H polypeptides as well as CD46-targeted CDV H polypeptides were similarly expressed at the cell surface. Next, quantitative fusion assays revealed that whereas only MeV H polypeptides resulted in fusion activity in CHO-Nectin-4 cells. all but the untargeted CDV H polypeptides produced fusion in CHO-CD46 cells (FIG. 3B). scFv binders A10, A09, G09. and K2 displayed on CDV H polypeptides induced fusion levels similar to those seen in MeV H polypeptides, whereas scFV G101469 and K01 were comparably lower CDV H-scFv A09/CDV F polypeptide were chosen to replace the existing MeV coat. This virus. referred to herein as Stealth 2.0, was rescued, and the H/F polypeptides were confirmed to be successfully displayed on the virions. Western Blot analysis confirmed that MeV H polypeptide was detected only in the case of MeV when an anti-MeV H polypeptide antibody against the cytoplasmic tail was used. On the contrary. CDV H-scFV A09 polypeptide was only detected when the membrane was probed with an anti 6×HIS-tag antibody (FIG. 3C). This same HIS-tag system allowed the replication of the Stealth 2.0 virus in Vero cells stably expressing the anti-HIS scFv but not in the parental Vero cell line (FIG. 3D). The replication kinetics was comparable to that obtained by MeV on Vero/hSLAM. Together, these results demonstrate that the measles virus envelope H and F polypeptides can be replaced by H and F polypeptides from CDV without a negative impact on virus replication.

[0105] The neutralization sensitivity of Stealth 2.0 was studied using pooled serum from 20-30 American donors. As control, CDV antisera was used. FIG. 3E shows that Stealth 2.0 was insensitive to the neutralization activity of MeV antisera On the contrary, the neutralization pattern of MeV was essentially the opposite, being neutralized by anti-measles antibodies, but not by anti-CDV antibodies.

[0106] The following was performed to confirm the virus tropism endowed by the new envelope since virus-entry could occurred in the absence of evident fusion. Virus-derived GFP autofluorescence was observed when CHO cells expressed the receptors CD46, Nectin-4, and either canine or human SLAMF1 (FIG. 3F). Conversely. GFP-autofluorescence driven by Stealth 2.0 was only observed in the case of anti-6×HIS scFv expression (CHO-HIS). CD46. and canine SLAMF1. These results demonstrate that a human CD46-tropic measles virus resistant to anti-measles virus antibody neutralization can be generated by using a CD46-targeted CDV H/F envelope.

### Stealth 2.0 Induces a Similar Anti-Tumor Effect as the Parental MeV

[0107] The following was performed to assess the use of Stealth 2.0 as an oncolytic agent. SCID mice bearing U266.B1 tumors were treated with a single intravenous dose of either MeV or Stealth 2.0 (FIG. 4A). The implanted tumors in the PBS-treated group continued to grow exponentially (FIG. 4B), and they all had to be sacrificed because of tumor burden by day 12 (FIG. 4C). On the contrary, both treatment groups had a slower tumor progression that resulted in a significantly increased median survival. Because similar oncolytic activity was observed for Stealth 2.0 and MeV, the latter being able to use in addition to CD46, the receptors Nectin-4 and SLAMF1, these results demonstrate that CD46 targeting is sufficient for tumor regression in a myeloma multiple model. Moreover, Stealth 2.0 demonstrated that it could substitute the current oncolytic MeV vaccine when high levels of neutralizing anti-measles virus antibodies are present in patients.

### CDV H/F Complexes can Retarget Other Mononegavirales

[0108] The following was performed to investigate the suitability of CDV H/F complexes to govern the tropism of VSVs, which are a member of the genus Lysasavirus, family Rhadoviridae. A VSV engineered to express interferon-beta (IFN-β) and the sodium iodide symporter (NIS), VSV-hIFNβ-NIS, (Naik et al. Mol. Cancer Ther., 17(1):316-326 (2018)) was obtained and modified by replacing the VSV-G polypeptide with CDV H and F polypeptides using the techniques described elsewhere (Ayala-Breton et al. Hum. Gene Ther., 23(5):484-91 (2012)). CDV F_{22458/16} polypeptide and either the parental CDV H₅₈₀₄ polypeptide (VSV-CDVFH-GFP) or the CDV H polypeptide retargeted against EGFR (VSV-CDVFHaal-αEGFR-GFP) or CD38 (VSV-CDVFHaal-αCD38-GFP) receptors were used (FIG. 5). In addition, each of the CDV H polypeptides contained a R529A mutation (CDV Haa) within the existing CDV H_{Y539A} background to abrogate interaction with canine SLAMF1.

[0109] To confirm that the new envelope complex governed virus tropism, a panel of CHO cells expressing specific receptors were infected. As shown in FIG. 6, when the virus displayed the parental CDV F/H complex, GFP autofluorescence was observed in those cells expressing either Nectin-4 or canine SLAMF1 receptors. On the contrary, when the EGFR-specific scFv CDV H was present, only infection and GFP autofluorescence was observed in those cells expressing the EGFR receptor. Likewise, when the CD38-specific scFv CDV H was present, only infection and GFP autofluorescence was observed in those cells expressing the CD38 receptor. In this case, syncytia formation and cell-killing effect was observed in cells expressing CD38, but not with CHO cells expressing the EGFR receptors; whereas an opposite pattern was observed with the EGFR-specific virus (VSV-CDVFHaal-αEGFR-GFP) (FIG. 7). These results demonstrate in the context of rhabdoviruses that the CDV F/H complexes can be used to govern cell-entry and syncytia-formation in a receptor-specific manner via scFv display using a receptor of choice to re-direct virus tropism.

[0110] The use of this system as an oncolytic vector also was assessed in vivo (FIG. 8). Athymic nude mice bearing SKOV3ip.1 tumors were treated with a single dose of EGFR-targeted VSV or the VSV-hIFNβ-NIS currently undergoing testing in the clinic. Whereas VSV-hIFNβ-NIS did not improve survival versus PBS-treated controls, the EGFR-targeted VSV resulted in significantly improve survival (p<0.005). These results demonstrate that the targeted VSVs described herein can be used for oncology purposes.

### CD38 and EGFR Targeted MeV

[0111] The following was performed to confirm that CD38 and EGFR targeting in the context of MeV can be achieved using CDV F and H polypeptides (FIG. 11). To increase safety, further mutations were inserted into the CDV H polypeptide to hamper a potential reversion to the use of natural receptors (Sawatsky et al. J. Virol., 92(15):e0069-18 (2018)). In addition to the R529A amino acid substitution, D526A, I527A, S528A, R529A, Y539A, Y547A, and T548 substitutions also were included (FIG. 11A). FIG. 11B shows that the introduction of these mutations in the context of CD38-targeted CDV H polypeptide did not influence fusogenicity capacity. Similarly, FIG. 11C demonstrates that the different point mutations did not influence the neutralization sensitivity of the polypeptides to measles immune human serum. Although the fusion activity of the CD38-targeted MeV H polypeptide was inhibited by pooled measles antisera up to 1:80 dilution, the homologous CD38-targeted CDV H polypeptide was not at the highest concentration tested of a 1:10 dilution. Similar to the case of Rhabdoviruses, Measles Virus incorporating the targeted CDV H/F complexes could infect and fuse cells in a CD38 or EGFR-specific manner (FIG. 11D). This infection-specificity also was observed with an array of tumor cell lines. Skov3pi and U87 cells (EGFR-positive) were infected by EGFR-targeted viruses, but not CD38-targeted viruses. On the contrary, Raji and Ramos cell lines (CD38 positive) were infected exclusively by the CD38-targeted viruses. As a control, cells expressing the 6×HIS pseudo receptor (“6×HIS” disclosed as SEQ ID NO. 21) were infected by all retargeted viruses. These results demonstrate that CDV F/H complexes can be used to avoid anti-measles immunity and drive cell-targeted entry and syncytia formation.

[0112] The in vivo oncolytic activity of CD38 and EGFR-targeted MeV were also investigated. SKOV3ip.1 tumors were implanted either subcutaneously or intraperitoneally into athymic nude mice, followed by virus treatment using the same route (FIG. 11E). Although CD38-targeted viruses showed some therapeutic potency, the potency exhibited by the EGFR-targeted viruses was superior (FIG. 11F). Conversely, CD38-targeted viruses exhibited no anti-tumor potency after intraperitoneal injection, whereas EGFR-targeted viruses resulted in complete tumor regression as observed by 100% percentage survival. Of note, no differences were observed between MeVs retargeted with either the MeV H/F complexes or CDV H/F. These results demonstrate that CDV H/F complexes can enhance the anti-tumoricidal properties of oncolytic measles virus without the problem of being neutralized by measles-induced neutralizing antibodies.

### Example 2—Further Analysis of CD46-Specific Oncolytic Measles Viruses Resistant to Neutralization by Measles-Immune Human Serum

[0113] This example repeats some of the information and results from Example 1 in addition to providing additional results.

### Heterologous Combinations of Wild-Type CDV Glycoproteins Result in Enhanced Cell Membrane Fusion

[0114] The MeV coat was replaced with an alternate viral coat that would enable the virus to evade neutralization by anti-measles antibodies. To do this, wild-type CDV was selected. While a strain of CDV approved for vaccine use exists (the Onderstepoort strain), this strain can use a currently unidentified receptor in addition to SLAMF1 and Nectin-4 (FIG. 14), which would have made it challenging to modify the viral tropism. Therefore, wild-type strains were focused on as they are known to interact exclusively with SLAM and nectin-4.

[0115] The following was performed to identify the most fusogenic CDV H/F glycoprotein pair. Different H/F combinations from the 5804P and SPA.Madrid/16 (hereafter named 5804 and SPA, respectively) isolates were transiently expressed in Vero cells expressing either SLAMF1 or NECTIN4 and assessed qualitatively the degree of cellular fusion (syncitia formation) induced by the viral proteins. Fusion activity for the CDV-H/F pairs was not observed when the 135 aa-signal peptide was maintained in CDV-F (FIG. 15A). When swapped by the homologous from MeV F, coexpression of H/F proteins from 5804P resulted in cell fusion in SLAMF1- and NECTIN4-expressing cells whereas coexpression of those from SPA promoted cell fusion exclusively in SLAMF1-expressing Vero cells. On the other hand, coexpression of the heterologous combination CDV-H 5804 and CDV-F SPA, but not CDV-H SPA and CDV-F 5804, resulted in syncytia formation in SLAMF1- and NECTIN4-expressing Vero cells. The data summarized above provided evidence in support of a fusion defect on CDV-H SPA. To begin to address whether the lack of fusion of CDV-H SPA on NECTIN4-expressing cells was due to a lower affinity for the receptor, fusion phenotypes were quantitatively compared via nonnatural receptors thus leveling the playing field for receptor binding affinity. This approach was to fuse a His-tagged CD38-specific scFv to the C-terminal domain of the receptor binding proteins and to determine fusion levels in CHO cells encoding either CD38 or the pseudoreceptor for the HIS-tag (CHO-αMIS). A L437M substitution was included into CDV-H SPA since L437 corresponded to a clone-specific mutation not present in any other CDV genetic group (FIG. 16). For comparison purposes, retargeted receptor binding proteins from other viruses were additionally included: MeV-H-and Nipah-G (Bender et al., PLoS Pathog., 12(6):e1005641 (2016); and Nakamura et al., Nat. Biotechnol., 22(3):331-6 (2004)). For added rigor to the comparisons, expression of the receptor binding proteins was initially analyzed by western blot and flow cytometric analysis, which demonstrated no significant impact on protein folding or surface expression (FIGS. 17A and 17B). When the CDV-H/F pairs from SPA proteins were expressed in CHO-C38, only the CDV-H SPA with M437L promoted fusion (FIG. 15B). Notably, no significant difference in fusion competence was observed between the two homotypic CDV-H/F pairs from the SPA or 5804P isolates. Surprisingly, the fusion activity triggered by the heterologous H/F combination CDV-H 5804/F SPA surpassed that achieved by the homologous combinations CDV-H/F 5804 and CDV-H/F SPA. For the retargeted Nipah G/F pair, although significant fusion levels were observed in CHO-CD38 cells (p<0.0001), they were insignificant when compared to those obtained by the unretargeted CDV H/F OL pair.

[0116] Based on this set of experiments, the hyperfusogenic CDV-H 5804/F SPA pair was selected for further investigation and modification.

The Strength of the CDV H/F Interaction Inversely Correlates with the Cell-to-Cell Fusion Efficiency
The enhanced cell membrane fusion observed for the CDV-H 5804/F SPA pair might be related to a lower binding avidity at the H/F interface. This was based on the observation that H/F dissociation is essential for the fusion process (Plemper et al., J. Virol., 76(10):5051-61 (2002); and Bradel-Tretheway et al., J. Virol., 93(13) (2019)). In order to test the hypothesis, the relative strengths of association different combinations of CDV-H and F proteins were evaluated by coimmunoprecipitation (co-IP) assays. To facilitate detection, CDV-F SPA was fused to a FLAG-tag, which had no effect on the bioactivity of the protein (FIG. 18). The results, presented in FIG. 15C, showed that the presence of the M437L mutation in CDV-H SPA weakened its affinity for CDV-F SPA. In addition, the affinity of CDV-F SPA for CDV-H 5804 was slightly lower than that of CDV-F SPA for CDV-H SPA (FIG. 15C). Taken together, these data indicate that there is an inverse correlation between fusogenicity levels and the strength of the CDV-H/F interaction.

### Fully-Retargeted CDV Envelope Glycoproteins Display Comparable Fusion Activity to MeV Glycoproteins

[0117] The CDV-H proteins described above could still use NECTIN4 as a receptor (FIG. 15A). In order maximize retargeting efficiency, the CDV-H protein needed to be detargeted from this undesirable interaction with human cells. To determine whether the ablation of this natural tropism would affect the cell fusion induced by CDV-H/F binding to a nonnatural receptor, a Y539A mutation was introduced to CDV-H, which corresponds to Y543A in MeV-H, a mutation that was previously shown to abrogate NECTIN4-dependent fusion (Mateo et al., J. Virol., 87(16):9208-16 (2013)) while not affecting cell-surface expression (Sawatsky et al., J. Virol., 86(7):3658-66 (2012)). The fusion proficiency of CDV-H 5804 (Y539A) 5804/F SPA was then compared with that of a fully retargeted MeV-H/F pair (Nakamura et al., Nat. Biotechnol., 23(2):209-14 (2005)). For this, the quantitative and kinetic fusion assay based on a dual-split GFP/luciferase reporter protein was utilized. The data, presented in FIG. 15D, indicate that CD38-targeted CDV-H 5804 (Y539A) had no fusion activity in CHO-NECTIN-4 cells but did induce fusion in CHO-αHIS cells (construct CDV H 5804 (Y539A)/F SPA and CDV H 5804 (Y539A)αCD38/F SPA) and CHO-CD38 cells (CDV H 5804 (Y539A)αCD38/F SPA). Because the fusion activity of the NECTIN-4 blind CDV-H 5804/F SPA pair was comparable to that obtained with the fully retargeted MeV-H protein, it was concluded that CDV-H 5804 (Y539A) can efficiently retarget the CDV-H/F complex to specific receptors, and this protein was selected for incorporation in the fully retargeted virus.

### Binding Affinity Determines Efficient Retargeting of CDV H/F Complexes to CD46

[0118] Given that the CDV-H protein selected as described above could be efficiently retargeted to CD38 by fusing a CD38-specific scFv, this protein was next retargeted to CD46 via display of a CD46-specific scFv. It was postulated that the C-terminal display on CDV-H of an scFv that recognized CD46 with sufficiently high binding affinity would result in CD46-mediated cell-to-cell fusion activity similar to that induced by the MeV H/F complex. To test this, an anti-CD46 scFv with high affinity for CD46 was identified by assessing binding to purified CD46 of several different scFv variants isolated from a phage antibody display library (FIG. 19). Surface plasmon resonance technology was applied using sensor chips with covalently immobilized anti-Fc antibody. Chimeric Fc-scFv fusion proteins were captured onto the sensor surface which was subsequently interrogated with soluble CD46 comprising SCR1-4 (FIG. 20A). Under these assay conditions, the results showed that the affinity constants (Kd) of the chimeric Fc-scFv fusion proteins displaying the A09 and K2 fragments were significantly stronger than those of the K01 and N1E fragments (A09>K2>N1E>K2), primarily due to increased association (A09) or lower dissociation rates (K2) (Table 4, FIG. 20B).

TABLE 4
Affinity and kinetic rate constants for single-chain variable
fragment binding to CD46.

| Interaction | Kₒₙ × 10⁴ (M⁻¹s⁻¹) | K_{off} × 10⁻³ (s⁻¹) | K_{D} (nM) |
|---|---|---|---|
| scFv A09-CD46 | 3.34 ± 1.68 | 0.606 ± 0.07 | 21.4 ± 7.82 |
| scFv K2-CD46 | 24.0 ± 3.79 | 10.8 ± 1.81 | 44.8 ± 13.3 |
| scFv N1E-CD46 | 3.69 ± 1.28 | 5.16 ± 2.21 | 139 ± 22.6 |
| scFv K1-CD46 | 4.13 ± 0.77 | 11.5 ± 2.58 | 287 ± 97.5 |

Association (Kₒₙ) and dissociation (K_{off}) reaction were determined with a BIACORE T100 instrument using a 1:1 Langmuir binding model.

[0119] The following was performed to determine whether fusion of a scFv to the CDV-H protein can support CD46-dependent fusion and if so, how CD46 binding affinity would affect cell fusion. The primary approach was to perform quantitative fusion assays for the detargeted CDV H [5804 (Y539)] and retargeted CDV-H [5804 (Y539)-scFv]/F SPA pairs and to compare them to the unmodified MeV/F complex on CHO cells and CHO cells expressing either NECTIN4 or CD46. All the proteins were expressed at comparable levels (FIG. 21). With the exception of scFv K01, all the other anti-CD46 scFvs allowed the CDV-H/F complex to induce cell-to-cell fusion in CHO-CD46 cells (FIG. 20C) and in a HeLa cell line with high CD46 expression (FIG. 21). Only the MeV-H/F complex induced cell-to-cell fusion in CHO-NECTIN-4 cells.

[0120] It was conclude from this set of experiments that there exists a binding affinity threshold for CD46-mediated cell-cell fusion through the retargeted CDV H/F complexes and above this threshold there is a positive correlation between binding affinity and intercellular fusion.

The CD46-Targeted CDV Envelope Glycoproteins are Efficiently Incorporated into MeV Virions and Mediate Virus Entry in Accordance with their Binding Affinity

[0121] The following was performed to investigate whether higher receptor affinity translated into higher virus infectivity. To begin to address this question, a panel of isogenic MeVs were generated where the MeV coat was replaced with CDV-F SPA together with CDV-H 5804 (Y539A) displaying low (K1), intermediate (N1E) and high (A09) affinity scFv specific for CD46 (FIG. 22A). These “Stealth” viruses were further engineered to express either eGFP or firefly luciferase as reporter genes and were rescued on Vero-αHIS cells. The ability of the Stealth viruses to infect CHO-CD46 cells or the producer cell line (Vero-αHIS) were next assessed. The data, presented in FIG. 22B, showed that all three Stealth viruses efficiently induced syncytia formation on Vero-αHIS cells, but only Stealth-A09 formed syncytia on CHO-CD46 cells. Stealth-N1E gave rise to small clusters of unfused GFP-positive CHO-CD46 cells, whereas Stealth-K1 apparently failed to infect them (FIG. 22B). When using luciferase as a reporter for infection, CD46-dependent infection with Stealth-K1 was detected, but the luciferase levels were significantly lower than those obtained when cells were infected with Stealth-A09 (FIGS. 22C and 23), indicating that binding to CD46 determines the efficiency of virus entry.

[0122] Based on its superior CD46-dependent virus entry, Stealth-A09 (this virus was referred to as Stealth 2.0 in Example 1) was selected for further characterization. Stealth-A09 replicated in Vero-αHIS cells but not in the parental Vero cell line, indicating efficient virus replication through the HIS-pseudo receptor and a lack of interaction with CD46 from African green monkey (FIG. 22D). To estimate the relative particle-to-infectivity ratio of the Stealth-A09 in relation to the original MeV, western blot analysis was performed on virus preparations to detect the major structural protein (N), and no significant differences in expression levels were observed (FIG. 22E). Since equivalent numbers of virus particles were analyzed, the data suggest similar particle-to-plaque-forming unit (PFU) ratios for the two viruses, indicative of efficient incorporation into the virions of the foreign envelope. The receptor-specific tropism of the viruses was next fully examined by infecting a panel of CHO cells stably expressing αHIS, CD46, NECTIN-4, or either human or canine SLAMF1. The results, presented in FIG. 22F, showed that MeV infected CHO cells expressing the receptors CD46 and NECTIN-4 and either canine or human SLAMF1, whereas Stealth-A09 only infected CHO-αHIS, CHO-CD46, and CHO-dogSLAM cells, indicating that Stealth-A09 is efficiently retargeted against human CD46.

[0123] In keeping with a recent report showing that CDV-H does not bind human SLAMF1 (Fukuhara et al., Viruses, 11(8) (2019)), entry of MeV-Stealth-A09 into CHO-hSLAMF1 was not observed (FIG. 22F). However, adaptation to human SLAMF1 via a different CDV strain has been observed (Bieringer et al., PLoS One, 8(3):e57488 (2013)). Therefore, to assess the likelihood of MeV-Stealth adapting to human SLAMF1, the virus was passaged consecutively in Vero-hSLAMF1 cells, and viral tropism was analyzed. The infected cells were blind-passaged eight times at 5-day intervals before testing the tropism. This number of passages has been previously shown to suffice to induce cyclical adaptation of measles virus quasispecies (Donohue et al., PLoS Pathog., 15(2):e1007605 (2019)). As shown in FIG. 22G, at the end of this selective pressure, MeV-Stealth-A09 was still able to induce syncytia formation only in Vero-dogSLAMF1 cells, not in Vero or Vero-hSLAMF1 cells, where only discrete GPF-positive cells were observed. Thus, the data argue against a potential adaptation to allow use of the pathogenic human SLAMF1 receptor.

[0124] Collectively, these results indicate that the MeV H/F glycoproteins can be exchanged with the CD46-retargeted CDV-H/F glycoproteins and that cell entry is dependent on receptor affinity.

### MeV-Stealth Oncolytic Activity is Dependent on its CD46 Binding Affinity

[0125] The following was performed to determine the antitumor potential of Stealth viruses and the role of CD46 binding affinity in vivo. For this, athymic mice bearing peritoneally disseminated SKOV3ip.1 tumors expressing the firefly luciferase gene (SKOV3ip.Fluc) were treated with a single intraperitoneal dose of saline or 10⁶ TCID₅₀ of Stealth-N1E and Stealth-A09 (n=5). Tumor burden was then monitored using in vivo bioluminescence imaging (FIG. 24A). By day 7, a comparable reduction in tumor burden was observed in animals that received either Stealth-N1E or Stealth-A09 when compared with the control group (FIG. 24B). However, the statistical significance in the reduction of tumor burden was lost for the Stealth-N1E group by day 21, whilst this was not the case for the Stealth-A09 group. Comparison of survival curves showed that only MeV Stealth-A09 increased mouse survival compared to the control group. Thus, Stealth-A09 shows oncolytic potency that appears dependent on its higher CD46 affinity.

### MeV-Stealth Achieves Oncolysis and Prolongs Survival of Myeloma and Ovarian Tumor-Bearing Mice

[0126] The following was performed to assess the utility of MeV-Stealth-A09 over MeV as an oncolytic agent. For this, we initially left untreated (PBS-treated group) or treated severe combined immunodeficiency (SCID) mice bearing subcutaneous human myeloma xenografts (derived from U266.B1 cells) with a suboptimal intravenous dose of MeV-Stealth or MeV. The tumors in the PBS-treated group continued to grow exponentially, and all mice had to be sacrificed because of the tumor burden by day 12 (FIG. 25A). Treatment with either MeV or MeV-Stealth-A09 slowed tumor progression, resulting in a significantly increased median survival time of 7 and 5 days, respectively (FIG. 25B). In order to assess whether the oncolytic effect was due to virus replication, histological analysis of explanted tumors was performed. The results, presented in FIG. 25C, strongly indicated that both viruses were able to home to tumor tissue. These results strongly suggested that CD46-targeted Stealth induces oncolysis at similar levels compared to MeV, which targets both CD46 and SLAMF1, thereby inducing tumor regression in this multiple myeloma model.

[0127] Next, the therapeutic effect of MeV-Stealth-A09 in prolonging survival in the presence of measles-immune serum was evaluated. Before embarking on this in vivo study, the neutralization sensitivity of recombinant viruses was first evaluated in vitro. The results, presented in FIG. 26, showed that MeV-Stealth-A09 was insensitive to the neutralizing activity of measles-immune human serum, whereas it was completely neutralized by CDV-immune ferret or mouse serum. The opposite pattern was observed essentially for MeV (FIG. 23). SKOV3ip.Fluc cells were then implanted into the peritoneal cavities of athymic nude mice, which received either PBS or measles-immune human serum prior to a single intraperitoneal injection of MeV or MeV-Stealth (FIG. 27A). Animals that did not receive any virus injection as well as those treated with MeV in the presence of immune serum exhibited high bioluminescence activity that continued to increase over time (FIG. 27B), indicating that MeV could not exert oncolysis in the presence of pre-existent immunity. On the contrary, Kaplan-Meier survival curves indicated that, in the absence of immune serum, both oncolytic virus (OV) treatments significantly prolonged mouse survival, with a median survival times of 37 days for the MeV-treated mice and 53 days for the Stealth-treated mice versus a median survival time of 18 days for the control mice (FIG. 27C). However, prolonged survival following MeV treatment was completely abrogated when mice received measles-immune serum, whereas MeV-Stealth treatment was still able to significantly prolong survival (median survival time of 28 days) with no statistical difference over treatment in the absence of immune serum.

[0128] These results demonstrate that CD46 targeting drives oncolyis in both a xenograft myeloma model and an orthotropic model of ovarian cancer, and that exchange of the MeV coat by the homologous CDV-H/F fusion apparatus shields MeV from MeV-immune human serum.

### Methods and Materials

### Cell Lines

[0129] Baby hamster kidney cells (BHK, Cat. #CCL-10, ATCC, Manassas, VA, USA), Human kidney epithelial cells (HEK293T) obtained from Dr. Franųcois-Loïc Cosset (Universitd de Lyon), and the human ovarian cancer cell line SKOV3ip.1-Fluc (Mader et al., Clin. Cancer Res., 15(23):7246-55 (2009)) were maintained in Dulbecco's modified Eagle's medium (DMEM; Cat. #SH30022.01, GE Healthcare Life, Pittsburgh, PA, USA) supplemented with 5% fetal bovine serum (FBS; Cat. #10437-028; Thermo Fisher Scientific, Waltham, MA, USA). Vero African green monkey kidney cells (Vero, ATCC, Cat. #CCL-81) and their derivatives (expressing human NECTIN-4 (Noyce et al., Virology, 436(1):210-20 (2013)), human SLAMF1 (Ono et al., J. Virol., 75(9):4399-401 (2001)) or a membrane-anchored single-chain variable fragment (scFv) specific for a hexahistidine peptide (6×HIS-tag (SEQ ID NO: 21)) (Nakamura et al., Nat. Biotechnol., 23(2):209-14 (2005)) were cultured in DMEM (Cat. #SH30022.01, GE Healthcare Life Sciences) as described elsewhere (Munoz-Alia et al., Viruses, 11(8) (2019)). Vero cells constitutively expressing the canine SLAMF1 molecule (Vero-dogSLAMF1) were generated by transduction and puromycin selection of a second-generation lentiviral vector (kindly provided by Dr. Lukkana Suksanpaisan [Imanis Life Science, Rochester, MN, USA]) encoding, under the control of the spleen focus-forming virus promoter, a codon-optimized SLAMF1 molecule from Canis lupus familiaris (GenBank NP_001003084.1) with an N-terminal FLAG-tag sequence (DYKDDDD (SEQ ID NO: 28)). Cells were maintained in DMEM supplemented with 5% FBS. The Chinese hamster ovary (CHO) cell line, CHO-CD46 cells, CHO-hSLAMF1 cells, CHO-dogSLAMF1 cells, CHO-NECTIN4 cells, CHO-αHIS cells, CHO-CD38 cells and the human myeloma cell line U266.B1 (kindly provided to us by Dr. David Dingli [Mayo Clinic, Rochester, MN]) were grown in RPMI 1640 medium supplemented with 10% FBS. Cells were incubated at 37° C. in 5% CO2 with saturating humidity.

### Plasmids and Construction of Full-Genome Recombinant Measles Virus (MeVP)

[0130] To generate canine distemper virus (CDV) SPA.Madrid/22458/16 expression plasmids, total RNA was extracted from CDV SPA.Madrid/22458/16 isolate-infected Vero/dog SLAMF1 cells (passage 1) using the RNeasy Mini Kit (Qiagen, Hilden, Germany). Both the CDV-hemagglutinin (H) and CDV-fusion (F) genes were reverse transcribed with SuperScript III Reverse Transcriptase (Cat. #11752050, Thermo Fisher Scientific) and amplified by PCR with the following primers: CDVH7050(+): 5′-AGAAAACTTAGGGCTCAGGTAGTCC;-3′ (SEQ ID NO: 22) CDVH8949(−): 5′-TCGTCTGTAAGGGATTTCTCACC-3′ (SEQ ID NO: 23); CDVF4857(+): 5′-AGGACATAGCAAGCCAACAGG-3′ (SEQ ID NO: 24) and CDVH7050(−): 5′-GGACTACCTGAGCCCTAAGTTTCT-3′ (SEQ ID NO: 25). PCR products were sequenced directly by Sanger sequencing (Genewiz, Plainfield NJ, USA) and cloned into the pJET1.2 vector (Thermo Fisher Scientific). Next, the CDV-H open reading frame was PCR amplified with a forward primer (5′-CCG GTA GTT AAT TAA AAC TTA GGG TGC AAG ATC ATC GAT AAT GCT CTC CTA CCA AGA TAA GGT G-3′ (SEQ ID NO: 26)) and a reverse primer (5′-CTA TTT CAC ACT AGT GGG TAT GCC TGA TGT CTG GGT GAC ATC ATG TGA TTG GTT CAC TAG CAG CCT CAA GGT TTT GAA CGG TTA CAG GAG-3′ (SEQ ID NO: 27)) and cloned into a PacI and SpeI-restricted (New England Biolabs, Ipswich, MA, USA) pCG vector (Cathomen et al., J. Virol., 72(2):1224-34 (1998)) using an InFusion HD kit (Takara, Shinagawa, Tokyo, Japan). The primers contained the PacI and SpeI restriction sites (underlined) as well as the coding sequence for the untranslated region of MeV-H (italics). Similarly, the CDV-F open reading frame (amino acid residues 136-662) was cloned into the HpaI/SpeI-restricted pCG-CDV-F plasmid (von Messling et al., J. Virol., 75(14):6418-27 (2001)). The resulting plasmid pCG-CDV-F SPA.Madrid/22458/16 contained coding sequences for the MeV-F untranslated region and signal peptide.

[0131] Expression plasmids for the CDV-H/F Onderstepoort vaccine and 5804P isolate (von Messling et al., J. Virol., 75(14):6418-27 (2001)), as well as MeV Nse strain, were described elsewhere (Cathomen et al., J. Virol., 72(2):1224-34 (1998)). The signal peptide for CDV-F 5804 was replaced with heterologous MeV-F as described above for CDV-F SPA.Madrid/22458/16. The open reading frames of the Nipah-G and Nipah-F glycoprotein genes were amplified from purchased RNA templates (Cat. #NR-37391, BEI Resources), and the Nipah-F gene (GenBank AF212302.2) was inserted into the pCG vector using the NarI and PacI sites. Retargeted versions of the H/G proteins were generated by inserting the homologous PacI/SfiI-digested PCR product into pCGHX α-CD38 (Peng et al., Blood, 101(7):2557-62 (2003)). Insertion of the coding sequence for an scFv recognizing CD46 was performed by exchanging the anti-CD38 scFv via the SfiI and NotI restriction sites. Site-directed mutagenesis (QuickChange Site-Directed Mutagenesis Kit, Agilent Technologies, Santa Clara CA, USA) was used to ablate the tropism of H and remove the SpeI site in CDV-F.

[0132] The viruses used in this example were derived from the molecular cDNA clone of the Moraten/Schwart vaccine strain pB(+)MVvac2(ATU)P, with an additional transcriptional unit downstream of the phosphoprotein gene (Cathomen et al., J. Virol., 72(2):1224-34 (1998); and Munoz-Alia et al., Viruses, 11(8) (2019)). To avoid plasmid instability upon propagation in bacteria and increase virus rescue efficiency, the plasmid backbone was replaced with the pSMART LCkan vector (Cat. #40821-1; Lucigen, Middleton, WI, USA), with an optimized T7 promoter followed by a self-cleaving hammerhead ribozyme (Hrbz) (Beaty et al., mSphere, 2(2) (2017); and Munoz-Alia et al., Viruses, 11(8) (2019)). eGFP or firefly luciferase were cloned into the infectious clone by using the unique MluI/AatII restriction sites. Rescue of rMeVs was carried out employing the START system (Nakamura et al., Nat. Biotechnol., 23(2):209-14 (2005)).

### Expression of Recombinant Proteins

[0133] A plasmid encoding the CD46-Fc fusion protein was produced by fusing the CD46 ectodomain (residues 35-328) with the Fc domain of IgG1 (pfc1-hg1e3; InvivoGen, San Diego, CA, USA). The scFvs K1, K2, and A09 were designed with the VL and VH sequences separated by a GSSGGSSSG flexible linker (SEQ ID NO: 29), codon-optimized, synthesized and cloned into pUC57-Kan (GenScript). A fourth scFv (NIE) was designed with the VH and VL sequences separated by an SSGGGGS linker (SEQ ID NO: 30), codon-optimized, synthesized by Creative Biolabs (Shirley, NY) and cloned into pCDNA3.1+(Invitrogen). For the IgG constructs, scFvs were cloned into the unique AgeI and KpnI sites of pHL-FcHIS (Cat. #99846, Addgene, Cambridge, MA, USA), harboring the coding sequence for a secretion signal and a C-terminal human Fc region followed by a 6×HIS-tag (SEQ ID NO: 21). The recombinant proteins were expressed by transfecting Expi293F suspension cells (Thermo Fisher) in serum-free Expi293 expression medium (Thermo Fisher) in shaker flasks following the manufacturer's instructions. The culture supematants containing the recombinant proteins were collected and passed through a Protein G chromatography cartridge (Cat.#89926, ThermoFisher). Bound recombinant proteins were eluted with 0.1 M glycine (pH 2.0), followed by immediate neutralization with 1 M Tris (pH 8.0), and the isolated proteins were concentrated with an Amicon Ultra centrifugal concentrator (Millipore Sigma, Burlington, MA, USA). CD46 and NECTIN4 were released from the Fc region by incubation with HRV 3C Protease (Thermo Fisher) at a 1:200 ratio. A final purification step was performed using a Superdex 75 10/300 gel filtration column (GE Healthcare) equilibrated in phosphate-buffered saline (PBS). Protein concentrations were calculated from the protein extinction coefficient as determined from the amino acid composition.

### Fusion Assays

[0134] Cells were transfected using Fugene HD (PROMEGA, Fitchburg WI, USA) or TransIT-LT1 transfection reagent (Mirus Bio LLC, Madison WI, USA). For a quantitative fusion assay, a dual-split reporter system (Kondo et al., J. Biol. Chem., 285(19):14681-8 (2010); and Ishikawa et al., Protein Eng. Des. Sel., 25(12):813-20 (2012)) was used as described elsewhere (Munoz-Alia et al., Viruses, 11(8) (2019)), using BHK cells as the effector cells. For semiquantitative assessment of fusion, Vero cells and derivative cell lines were transfected with a total of 0.1 μg of DNA (1:1 ratio of H and F expression plasmids), including a GFP expression plasmid for added visualization of syncitia formation. Images were obtained with a microscope (Eclipse Ti-S; Nikon) at 40×or 100× magnification.

### Expression Analysis of Morbillivirus Attachment Proteins

[0135] For assessment of the level of the H polypeptide, transfected cells were analyzed by flow cytometry or cellular enzyme-linked immunosorbent assay (CELISA) using an anti-6×HIS-tag monoclonal antibody (Cat. #130-120-787, Miltenyi Biotec or Cat. #MA1-135, Thermo Fisher Scientific), as described elsewhere (Munoz-Alia et al., Viruses, 11(8) (2019); and Saw et al., Methods, 90:68-75 (2015)). For analysis of total protein expression by flow cytometry (FACSCanbt, BD Biosciences, San Jose, CA, USA), cells were treated with the eBioscience Intracellular Fixation & Permeabilization buffer (Cat. #88-8823-88, Thermo Fisher Scientific).

### Envelope Glycoprotein Coimmunoprecipitation (Co-IP)

[0136] Three micrograms (1 μg of H and 2 μg of F) of total DNA were transfected into HEK293T cells (4e5 cells). After 24 hours, the cells were washed twice with PBS and treated with the cross-linker 3-3′-diothiobis (sulfosuccinimidyl propionate) (DTSSP; Cat. #21578, Thermo Fisher Scientific) at 1 mM, followed by quenching with 20 mM Tris/HCl (pH 7.4) and lysis with 0.4 mL of M-PER mammalian protein extraction reagent (Thermo Fisher Scientific) containing a 1× Halt protease and phosphatase inhibitor cocktail (Cat. #1861281, Thermo Fisher Scientific). Soluble fractions were collected after centrifugation at 10,000×g for 10 minutes at 4° C., and one-thirtieth of the volume was set aside as the cell lysate input. The rest was incubated with 0.5 μg of anti-FLAG monoclonal antibody M2 (Sigma-Aldrich) and EZview red protein G affmity gel (Sigma-Aldrich, St. Louis, MO, USA). The precipitated material was washed (20 mM Tris-HCl, pH 7.4, 140 mM sodium chloride) and denatured by boiling in laemmli buffer containing β-mercaptoethanol.

### SDS-PAGE and Immunoblotting

[0137] Samples were fractioned by gel electrophoresis on a 4 to 12% NuPAGE Bis-tris gel (Thermo Fisher) and transferred to polyvinylidene difluoride (PVDF) membranes using an iBLOT 2 dry blotting system (Cat. #IB21001, Thermo Fisher Scientific). The protein material was detected though incubation with the antibodies anti-MeV-H606 (Hudacek et al., Cancer Gene Therapy, 20(2):109-16 (2013)), anti-MeV-F431 (von Messling et al., J. Virol., 78(15):7894-903 (2004)), anti-Fcyt (von Messling et al., J. Virol., 75(14):6418-27 (2001)), anti-MeV-N(Toth et al., J. Virol., 83(2):961-8 (2009)), anti-HIS (Cat. #A01857-40, GenScript, Piscataway NJ, USA), anti-β-actin (Cat. #A3854, Sigma-Aldrich), and anti-CD46 (Cat. #sc-7056, Santa Cruz, Dallas TX, USA). Immunoblots were visualized using a rabbit horseradish peroxidase (HRP)-conjugated secondary antibody and KwikQuant Imager (Kindle Bioscience LLC, Greenwich CT, USA). Representative results of two independent repeats are shown. Band quantification was carried out using the KwikQuant Image Analyzer 1.4. (Cat. #D1016, Kindle Biosciences, LLC)

### Antibody Binding Assay

[0138] An enzyme-linked immunosorbent assay (ELISA) was used to measure the binding of scFvs to CD46. Nunc-Immuno MicroWell 96-well solid plates were coated overnight at 4° C. with 1 μg of purified CD46 or N4 in 0.05 M carbonate-bicarbonate buffer, pH 9.6. (Cat. #E107, Bethyl Laboratories, Montgomery TX, USA). Purified scFv-Fc fusion proteins were then diluted in PBS and added at a concentration of 12.5 μg/mL. Bound antibodies were detected with a secondary anti-human IgG (Fc-specific) HRP-conjugated antibody (1:70,000; Cat. #A0170, Sigma-Aldrich). In parallel, 125 ng of scFv-Fc fusion protein was first bound to wells, and protein levels were monitored by measuring the optical density (OD490 nm) after incubation with the secondary antibody alone.

### Surface Plasmon Resonance (SPR)

[0139] The interaction between the scFv A09, 2B10, K1, K2, and CD46 was measured using series S CM5 sensor chips on a Biacore T-100 system (GE Healthcare, Waukesha, WI, USA). For A09, N1E, K1, and K2, 50 μg/mL of an anti-FC antibody (MAB1302, EMD Millipore, Burlington, MA, USA) diluted into 10 mM NaAcetate, pH 4.5, were immobilized to the active and the reference channel of the CM5 chip using amine coupling kit reagents (EDC (1-ethyl-3-[3-dimethylaminopropyl]carbodiimide), NHS (N-hydroxysuccinimide) and ethanolamine). The immobilization of the antibody resulted in ˜12000 response units. The interactions between CD46 and the anti-FC antibody captured scFv were measured at 25° C. with a data rate of 10 Hz using HBS EP buffer (0.01 M HEPES pH 7.4, 0.15 M NaCl, 3 mM EDTA, 0.005% v/v Surfactant P20). Each binding cycle began with the loading of 15 μg/mL of the scFv onto the active channel for 300 s at a flow rate of 10 μL/min. After 100 s of buffer wash and a 120 s stabilization period, CD46 (concentration range 50 nM-1000 nM for A09, 37.5 nM-100 nM for K2 and 50-1000 nM for N1E and K1) was flown over the active and the reference channel for 100 s at a flow rate of 40 μL/min. The association phase was followed by a 200 s dissociation period followed by a 60 s injection of 10 mM Glycine pH 2.0 at a flow rate of 30 μL/min, to regenerate the surface immobilized anti-FC antibody. All sensograms were fitted with a 1:1 binding model using the Biacore T100 evaluation software v2.04.

### Infections and Virus Growth Kinetic Analysis

[0140] For virus infections, cells were infected at the indicated MOIs for 90 min at 37° C. in Opti-MEM I reduced-serum medium. After the absorption phase, we removed the inoculum, washed, and added viral growth media (DMEM+5% FBS). When using eGFP-expressing viruses, fluorescence microscopy photographs were taken 48 hours post-infection. For infections with Fluc-expressing viruses, luciferase expression was measured using an Infinite M200 Pro multimode microplate reader (Tecan Trading AG) after adding 0.5 mM of D-Luciferin to the infected cells.

[0141] For virus growth kinetic analysis, Vero cells and derivative cell lines seeded in 6-well plates 16-18 hours prior to infection were infected at a multiplicity of infection (MOI) of 0.03 for 90 min in Opti-MEM (Cat. #31985070, Thermo Fisher Scientific). The inoculum was then removed, and the cell monolayers were washed three times with Dulbecco's phosphate-buffered saline (DPBS; Cat. #MT-21-031-CVRF, Mediatech, Inc., Manassas, VA, USA), and the medium was replaced with 1 mL of DMEM supplemented with 5% FBS. At the indicated time points, cell supernatants were collected, and cells were scraped into 1 mL of Opti-MEM, followed by 3 freeze/thaw cycles. Cell debris was removed by centrifugation (2,000×g for 5 min), and virus titers were determined in Vero-αHIS cells.

### Immunization Studies

[0142] Four to six-week-old male and female HuCD46Ge-IFNARKO mice (Mrkic et al., J. Virol., 74(3):1364-72 (2000)), deficient for type I IFN receptor and transgenically expressing human CD46, were inoculated intraperitoneally (i.p.) with 1×10⁵ TCID₅₀ particles of MeV or Stealth-A09. On day 28, serum samples were collected and stored at −20° C. until assessed for neutralizing antibodies.

### Neutralization Assays

[0143] A fluorescence-based plaque reduction microneutralization (PRMN) assay was carried out as described elsewhere (Munoz-Alia et al., J. Virol., 91(11) (2017)). Briefly, Vero-αHIS cells were seeded in a 96-well plate, and serial dilutions of serum samples were premixed for 1 hour at 37° C. with virus inoculum before they were added to the cells. The data were plotted as the log(dilution of serum) vs. the normalized response (variable slope) present with GraphPad software (Prism 8), and the neutralization dose 50% was calculated (ND50). Inclusion of the 3rd World Health Organization International serum standard (3IU/mL) enabled conversion of antibody titers to mIU/mL by calculation of the unitage constant (Haralambieva et al., Vaccine, 29(27):4485-91 (2011)). Pooled human serum from 60-80 donors that had blood type AB (Cat. #HS1017; Lot #C80553, Valley Biomedical Inc., Winchester, VA, USA) was used. The following reagents were obtained from the NIH Defense and Emerging Infections Research Resources Repository, NIAID, NIH: polyclonal anti-MeV antibody, Edmonston, (antiserum, Guinea Pig), NR-4024 and polyclonal anti-CDV Lederle Avirulent (antiserum, Ferret), NR-4025.

[0144] A lack of cross-neutralization between measles virus and Stealth was assessed (FIGS. 28A-B).

### Experimental Oncolytic Therapy

[0145] To establish subcutaneous tumors, 6-week-old female severe combined immunodeficiency (SCID) mice were injected in the right flank with 1×10⁷ U266.B1 tumor cells. When the tumor reached 0.5 cm in diameter, mice received a single intravenous dose of MeV (n=5) or Stealth (n=5) at 1×10 5 50% tissue culture infectious dose (TCID₅₀). Control mice (n=5) were injected with an equal volume of PBS. Animals were euthanized when the tumors ulcerated or when the burden reached 20% of the body weight. Tumor diameter was measured every other day, and tumor volume was calculated with the formula length×length×width×0.5.

[0146] To establish an orthotopic model of ovarian cancer, 5×10⁶ SKOV3ip.1 cells expressing firefly luciferase (SKOV3ip.1-Fluc) were injected into the peritoneal cavity of athymic nude mice. Ten days later, the animals received 600 mIU of measles-immune serum (Cat. #HS1017; Lot #C80553, Valley Biomedical Inc.) or an equal volume of saline, and three hours later, they were treated with a single intraperitoneal dose (1×10⁶ TCID₅₀) of MeV (n=5) or Stealth (n=5). The mice in the control group received a similar volume of Vero cell lysates (n=5). For the therapy experiment, 5×10⁶ SKOV3ip.1-Fluc cells were implanted instead. The tumor burden was monitored weekly through in vivo bioluminescence imaging using an IVIS Spectrum instrument (Perking Elmer, Waltham, MA, USA). The mice were euthanized at the end of the study (80 days), when they developed ascites or had lost 20% of their body weight. Statistical comparisons among groups were performed with the log-rank (Mantel-Cox) test, and p<0.05 was considered statistically significant.

### Statistical Analysis

[0147] Statistical analyses were performed with GraphPad Prism 8.3.1 version for Mac OS X. Significant differences among groups were determined using one-way analysis of variance (ANOVA) with Holm-Sidak's multiple comparison test Survival data were analyzed using the Kaplan-Meier method, and the log-rank test was used to identify significant differences among groups.

### OTHER EMBODIMENTS

[0148] It is to be understood that while the invention has been described in conjunction with the detailed description thereof, the foregoing description is intended to illustrate and not limit the scope of the invention, which is defined by the scope of the appended claims. Other aspects, advantages, and modifications are within the scope of the following claims.

1. A CDV F polypeptide having g signal peptide sequence that is less than 75 amino acid residues in length.

2. The CDV F polypeptide of claim 1, wherein said signal peptide sequence comprises no more than 75 amino acid residues of SEQ ID NO:6.

3. The CDV F polypeptide of claim 1, wherein said CDV F polypeptide comprises SEQ ID NO:4 with the proviso that said CDV F polypeptide lacks at least amino acid residues 1 to 60 or lacks at least amino acid residues 1 to 105 of SEQ ID NO:4.

4. The CDV F polypeptide of claim 1, wherein a recombinant virus comprising said CDV F polypeptide and a CDV H polypeptide exhibits increased fusogenic activity as compared to a comparable control recombinant virus comprising a full length, wild-type CDV F polypeptide and said CDV H polypeptide.

5-7. (canceled)

8. A CDV H polypeptide comprising 454A, 464A, 479A, 494A, 510A, 520A, 525A, 526A, 527S, 528A, 529A, 537A, 539A, 547A, 548A, or a combination thereof according to the amino acid numbering of SEQ ID NO:2.

9. The CDV H polypeptide of claim 8, wherein said CDV H polypeptide comprises a combination of two, three, four, five, or six of 454A, 464A, 479A, 494A, 510A, 520A, 525A, 526A, 527S, 528A, 529A, 537A, 539A, 547A, and 548A.

10. The CDV H polypeptide of claim 8, wherein said CDV H polypeptide comprises a combination of seven, eight, nine, ten, or eleven of 454A, 464A, 479A, 494A, 510A, 520A, 525A, 526A, 527S, 528A, 529A, 537A, 539A, 547A, and 548A.

11. The CDV H polypeptide of claim 8, wherein said CDV H polypeptide comprises a combination of 12, 13, or 14 of 454A, 464A, 479A, 494A, 510A, 520A, 525A, 526A, 527S, 528A, 529A, 537A, 539A, 547A, and 548A.

12. The CDV H polypeptide of claim 8, wherein said CDV H polypeptide comprises 454A, 464A, 479A, 494A, 510A, 520A, 525A, 526A, 527S, 528A, 529A, 537A, 539A, 547A, and 548A.

13. The CDV H polypeptide of claim 8, wherein said CDV H polypeptide comprises M437 according to the amino acid numbering of SEQ ID NO:5.

14-25. (canceled)

26. A replication-competent vesicular stomatitis virus comprising an RNA molecule, wherein said RNA molecule comprises a nucleic acid sequence that is a template for a positive sense transcript encoding a VSV N polypeptide, a nucleic acid sequence that is a template for a positive sense transcript encoding a VSV P polypeptide, a nucleic acid sequence that is a template for a positive sense transcript encoding a VSV M polypeptide, a nucleic acid sequence that is a template for a positive sense transcript encoding a CDV F polypeptide, a nucleic acid sequence that is a template for a positive sense transcript encoding a CDV H polypeptide, and a nucleic acid sequence that is a template for a positive sense transcript encoding a VSV L polypeptide, wherein said RNA molecule lacks a nucleic acid sequence that is a template for a positive sense transcript encoding a functional VSV G polypeptide.

27. The virus of claim 26, wherein said CDV F polypeptide is a CDV F polypeptide of claim 1.

28. The virus of claim 26, wherein said CDV H polypeptide is a CDV H polypeptide of claim 8.

29. The virus of claim 26, wherein said CDV H polypeptide comprises an amino acid sequence of a single chain antibody.

30. The virus of claim 29, wherein said single chain antibody is a single chain antibody directed to CD19, CD20, CD38, CD46, EGFR, αFR, HER2/neu, or PSMA.

31. The virus of claim 26, wherein said RNA molecule comprises a nucleic acid sequence that is a template for a positive sense transcript encoding a NIS polypeptide.

32-39. (canceled)

40. A method for treating cancer, wherein said method comprises administering a composition comprising said replication-competent vesicular stomatitis virus of claim 26 to a mammal comprising cancer cells, wherein the number of cancer cells within said mammal is reduced following said administration.

41. The method of claim 40, wherein said mammal is a human.

42. The method of claim 40, wherein said cancer is myeloma, melanoma, glioma, lymphoma, mesothelioma, lung cancer, brain cancer, stomach cancer, colon cancer, rectum cancer, kidney cancer, prostate cancer, ovary cancer, breast cancer, pancreas cancer, liver cancer, or head and neck cancer.

43-46. (canceled)

The application's sequence listing, which the Patent Office published only in electronic form, follows.

SEQUENCE LISTING (228 sequences)

SEQ ID NO: 1 - DNA, 1824 bp, Canine morbillivirus
atgctctcctaccaagacaaggtgggtgccttctacaaggataatgcaagagctaatttgtccaagctgtccttagtgacagaagagcaagggggcaggagaccaccctatttgctgtttgtccttctcatcctactggttggaatcctggccttgcttgctatcactggagttcgatttcaccaggtatcaattagcaatatggaatttagcagattgttgaaagaggatatggagaagtcagatgccgtacatcaccaagtcatagatgtcttgacaccgctcttcaaaattattggagatgagattgggttacggttgccacaaaaactaaacgagatcaaacaatttatccttcaaaagactaacttcttcaatccgaacagggaattcgacttccgcgatctccactggtgcattaatccgcctagtaagatcaaagtgaattttactagttactgtgatacaattgggatcagaaaatccattgcattggcagcaaatcccatccttttttcagcactctccggaggcagaggtgacatattcccaccatacagatgcagtggagctactacttcagttggcaaatctttccccctatcagtatcattatccatgtctttgatctcaagaacatcagagataatcaatatgctgacctctatctcagacggagtgtatggtaaaacttatttgctagtgcctgattatattgaaggggagttcgacacgcaaaagattcgagtctttgagatagggttcatcaaaaggtggctgaatgacatgccattattccagacaaccaactatatgatcctcccggagaattctaaaaccaaagtatgtactatagcagtgggcgagttgacactggcttccttgtgtgtagatgagagcactgtattattatatcatgacagcaatgattcacaagatggtattctagtagtgacgctgggaatctttggggcaacacctatggatcaagtcgaagaggtgatacctgtcgctcacccatcagtagaaaaaatacatataacaaatcaccgtggtttcataaaagattcggtagcaacctggatggtgcctgcattggtctctgagaacctagaggaacaaaaaaattgtctggagtcggcttgtcaaagaaaatcctaccctatgtgcaaccaaacatcatgggaaccctttggaggaggacagttgccatcttatgggcggttgacgttacatctagatgcaagcactgaccgtcaacttaacatatcatttacgtacggtccggttatactgaatggaaatggtatggattattatgaaagcccacttttggactccggatggcttaccattcctcctaagaatggaacaattcttggattgataaacaaagcaagtagaggagaccagttcactgtgatccctcatgtgttgtcatttgcgcccagggaatcaagtggaaactgttatttacctattcaaacatcccagattatggataaagatgtccttactgagtctaatttagttgtgttgcctacacagaattttagatatgtcatagcaacatatgatatatcccgaaacgatcatgcgattgtttattatgtttatgacccaatccggacgatttcttatacgtacccatttagactaactaccaagggtagatctgatttcctaaggattgaatgttttgtgtgggatgacgacctgtggtgtcaccaattttacaggttcgaggctgacatcaccaactctacaaccagtgttgagaatttagtccgtataagattctcctgtaaccgttcaaaaccttga

SEQ ID NO: 2 - protein, 607 aa, Canine morbillivirus
MLSYQDKVGAFYKDNARANLSKLSLVTEEQGGRRPPYLLFVLLILLVGILALLAITGVRFHQVSISNMEFSRLLKEDMEKSDAVHHQVIDVLTPLFKIIGDEIGLRLPQKLNEIKQFILQKTNFFNPNREFDFRDLHWCINPPSKIKVNFTSYCDTIGIRKSIALAANPILFSALSGGRGDIFPPYRCSGATTSVGKSFPLSVSLSMSLISRTSEIINMLTSISDGVYGKTYLLVPDYIEGEFDTQKIRVFEIGFIKRWLNDMPLFQTTNYMILPENSKTKVCTIAVGELTLASLCVDESTVLLYHDSNDSQDGILVVTLGIFGATPMDQVEEVIPVAHPSVEKIHITNHRGFIKDSVATWMVPALVSENLEEQKNCLESACQRKSYPMCNQTSWEPFGGGQLPSYGRLTLHLDASTDRQLNISFTYGPVILNGNGMDYYESPLLDSGWLTIPPKNGTILGLINKASRGDQFTVIPHVLSFAPRESSGNCYLPIQTSQIMDKDVLTESNLVVLPTQNFRYVIATYDISRNDHAIVYYVYDPIRTISYTYPFRLTTKGRSDFLRIECFVWDDDLWCHQFYRFEADITNSTTSVENLVRIRFSCNRSKP

SEQ ID NO: 3 - DNA, 1989 bp, Canine morbillivirus
atgcacaaggaaatccccgaaaaatccagaacccgaacacacacccaacaagacctcccccaacaaaaaagcaccgaatacaccgagatcaagacctcccgagcacgacacggcataacgccagctcagcgatccacgcactatggtcctcgaacattggacaggctcgtctgctacattatgaacagagccatgtcttgcaagcaagccagctacagatcggataacatcccagctcacggagaccacgagggtgttgtccatcacacaccagagagtgtctcccaaggagcgagatcccagctcaagaggcggacttccaatgcaatcaactcaggatttcagtacatctggttagtcctgtggtgcatcggaatagccagtctctttctttgttctaaggctcagatacattggaataatttatcaactattgggatcatcgggactgacagtgtccattataagatcatgactaggcccagccaccagtacttggtcataaaactaatgcctaatgtttcactcatagataattgtaccaaagcagaattaggtgagtatgagaaattattaaattcagtcctcgaaccaatcaaccaagctttgactctaatgaccaagaatgtgaagcctctacagtcagtagggtcaggtaggagacagaggcgttttgcaggagtggtgcttgcaggtgcagctttaggagtggccactgctgcacaaatcactgcagggatagctttacatcaatccaacctcaatgctcaagcaatccaatctctgagaactagccttgaacagtccaacaaggctatagaagaaattagggaggcaacccaggaaaccgtcattgccgttcagggagtccaggattacgtcaataatgaactcgtccctgctatacaacatatgtcgtgtgaattagttgggcagagattagggttaaaattgcttaggtattataccgagttgttgtcaatatttggcccgagtttacgtgatcctatttcagccgagatatcaattcaagcactgagttatgctcttgggggagaaattcataagatacttgagacgttggggtattctggaaatgatatgattgcaattttggagagtcgggggataaaaacaagaataactcatgttgatctccccgggaaatttatcatcttaagtatctcatacccaactttatcagaagtcaagggggttatagtccacagactggaagcagtttcttataacatagggtcacaagagtggtacaccactgtcccgaggtatgttgcaactaatggttacttaatatccaatttcgatgagtcatcctgtgtattcgtctcagaatcagccatttgtagccagaactccctataccccatgagcccacttctacaacaatgcattaggggcgacacttcatcttgtgctcggaccttggtgtctggaaccatgggcaataaatttattctgtcaaaaggcaatatcatcgcaaattgtgcttctatactatgtaagtgttatagcacaagcacaattatcaatcagagtcctgataagttgctgacctttattgcctccgatacatgcccactagttgaaatagatggtgtaaccatccaggttggaggcaggcaataccctgatatggtatacgaaagcaaagttgccctaggccctgctatatcacttgagaggctagatgtaggtacaaatttagggaacgcccttaagaaactggatgatgctaaggtactgatagactcatctaatcagatccttgagacggttaggcgctcttcctttaattttggcagtctcctcagcgttcctatattaagctgtgcagccctggctttgttattgctgatttactgctgtaaaagacgctatcaacagacactcaagcggaatactaaggtcgatccgacatttaaacctgatctgactgggacttctaaatcctatgtaagatcactctga

SEQ ID NO: 4 - protein, 662 aa, Canine morbillivirus
MHKEIPEKSRTRTHTQQDLPQQKSTEYTEIKTSRARHGITPAQRSTHYGPRTLDRLVCYIMNRAMSCKQASYRSDNIPAHGDHEGVVHHTPESVSQGARSQLKRRTSNAINSGFQYIWLVLWCIGIASLFLCSKAQIHWNNLSTIGIIGTDSVHYKIMTRPSHQYLVIKLMPNVSLIDNCTKAELGEYEKLLNSVLEPINQALTLMTKNVKPLQSVGSGRRQRRFAGVVLAGAALGVATAAQITAGIALHQSNLNAQAIQSLRTSLEQSNKAIEEIREATQETVIAVQGVQDYVNNELVPAIQHMSCELVGQRLGLKLLRYYTELLSIFGPSLRDPISAEISIQALSYALGGEIHKILETLGYSGNDMIAILESRGIKTRITHVDLPGKFIILSISYPTLSEVKGVIVHRLEAVSYNIGSQEWYTTVPRYVATNGYLISNFDESSCVFVSESAICSQNSLYPMSPLLQQCIRGDTSSCARTLVSGTMGNKFILSKGNIIANCASILCKCYSTSTIINQSPDKLLTFIASDTCPLVEIDGVTIQVGGRQYPDMVYESKVALGPAISLERLDVGTNLGNALKKLDDAKVLIDSSNQILETVRRSSFNFGSLLSVPILSCAALALLLLIYCCKRRYQQTLKRNTKVDPTFKPDLTGTSKSYVRSL

SEQ ID NO: 5 - protein, 604 aa, Canine morbillivirus
MLSYQDKVGAFYKDNARANSTKLSLVTEEHGGRRPPYLLFVLLILLVGILALLAITGVRFHQVSTSNMEFSRLLKEDMEKSEAVHHQVIDVLTPLFKIIGDEIGLRLPQKLNEIKQFILQKTNFFNPNREFDFRDLHWCINPPSKVKVNFTNYCESIGIRKAIASAANPILLSALSGGRSDIFPPHRCSGATTSVGKVFPLSVSLSMSLISRTSEIINMLTAISDGVYGKTYLLVPDDIEREFDTQEIRVFEIGFIKRWLNDMPLLQTTNYMVLPENSKAKVCTIAVGELTLASLCVEESTVLLYHDSSGSQDGILVVTLGIFWATPMDHIEEVIPVAHPSMEKIHITNHRGFIKDSIATWMVPALASEKQEEQKGCLESACQRKTYPMCNQTSWEPFGGRQLPSYGRLTLPLDASVDLQLNISFTYGPVILNGDGMDYYESPLLNSGWLTIPPKNGTIVGLINKAGRGDQFTVLPHVLTFAPWESSGNCYLPIQTSQIIDRDVLIESNIVVLPTQSFRYVIATYDISRSDHAIVYYVYDPIRTISYTHPFRLTTKGRPDFLRIECFVWDDNLWCHQFYRFEADIANSTTSVENLVRIRFSCNR

SEQ ID NO: 6 - protein, 135 aa, Canine morbillivirus
MHKEIPEKSRTRTHTQQDLPQQKSTEYTEIKTSRARHGITPAQRSTHYGPRTLDRLVCYIMNRAMSCKQASYRSDNIPAHGDHEGVVHHTPESVSQGARSQLKRRTSNAINSGFQYIWLVLWCIGIASLFLCSKA

SEQ ID NO: 7 - protein, 662 aa, Canine morbillivirus
MHKGIPKSSKTQTHTQQDRPPQPSTEPEETRTSRARHSITSAQRSTHYDPRTSDRPVSYTMDRIRSRKQTSHRLKNIPVHGNHEAIIQHIPESVSKGARSQIERRQPNAINSGSQCTWLVLWCLGIASLFLCSKAQIHWNNLSTIGIIGTDSVHYKIMTRPSHQYLVIKLMPNVSLIDNCTKAELGEYEKLLNSVLEPINQALTLMTKNVKPLQSLGSGRRQRRFAGVVLAGAALGVATAAQITAGIALHQSNLNAQAIQSLRTSLEQSNKAIEEIREATQETVIAVQGVQDYVNNELVPAMQHMSCELVGQRLGLRLLRYYTELLSIFGPSLRDPISAEISIQALSYALGGEIHKILEKLGYSGGDMIAILESRGIKTKITHVDLPGKFIILSISYPTLSEVKGVIVHRLEAVSYNIGSQEWYTTVPRYIATNGYLISNFDESSCVFVSESAICSQNSLYPMSPLLQQCIRGDTSSCARTLVSGTMGNKFILSKGNIVANCASILCKCYSTSTIINQSPDKLLTFIASDTCPLVEIDGVTIQVGGRQYPDMVYEGKVALGPAISLERLDVGTNLGNALKKLDDAKVLIDSSNQILETVRRSSFNFGSLLSVPILSCTALALLLLIYCCKRRYQQTLKQHTKVDPAFKPDLTGTSKSYVRSL

SEQ ID NO: 8 - protein, 75 aa, Artificial Sequence
  Description of Artificial Sequence: Synthetic polypeptide
MNRAMSCKQASYRSDNIPAHGDHEGVVHHTPESVSQGARSQLKRRTSNAINSGFQYIWLVLWCIGIASLFLCSKA

SEQ ID NO: 9 - protein, 31 aa, Artificial Sequence
  Description of Artificial Sequence: Synthetic polypeptide
MTSNAINSGFQYIWLVLWCIGIASLFLCSKA

SEQ ID NO: 10 - protein, 26 aa, Artificial Sequence
  Description of Artificial Sequence: Synthetic peptide
MSIMGLKVNVSAIFMAVLLTLQTPTG

SEQ ID NO: 11 - protein, 28 aa, Artificial Sequence
  Description of Artificial Sequence: Synthetic peptide
MAINSGSQCTWLVLWCLGIASLFLCSKA

SEQ ID NO: 12 - protein, 28 aa, Artificial Sequence
  Description of Artificial Sequence: Synthetic peptide
MAINSGSQCTWLVLWCLGMASLFLCSKA

SEQ ID NO: 13 - protein, 28 aa, Artificial Sequence
  Description of Artificial Sequence: Synthetic peptide
MAINSGSQCTWLVLWCFGTASLFLCSKA

SEQ ID NO: 14 - protein, 28 aa, Artificial Sequence
  Description of Artificial Sequence: Synthetic peptide
MATSPGPQCTWLVLWCIGIASLFLCSEA

SEQ ID NO: 15 - protein, 28 aa, Artificial Sequence
  Description of Artificial Sequence: Synthetic peptide
MAVKSGSQCTWLVLWCIGVASLFLCSKA

SEQ ID NO: 16 - protein, 28 aa, Artificial Sequence
  Description of Artificial Sequence: Synthetic peptide
MASNPGSQCTWLVLWCIGIASLFLCSKA

SEQ ID NO: 17 - protein, 28 aa, Artificial Sequence
  Description of Artificial Sequence: Synthetic peptide
MATNAGSQYTWLVLWCIGIASLFLCSKA

SEQ ID NO: 18 - protein, 28 aa, Artificial Sequence
  Description of Artificial Sequence: Synthetic peptide
MATSSGSQCTWLVLWCIGVASLFLCSKA

SEQ ID NO: 19 - protein, 28 aa, Artificial Sequence
  Description of Artificial Sequence: Synthetic peptide
MAINSGSQCTWLVLWCIGVASLFLCSKA

SEQ ID NO: 20 - protein, 28 aa, Artificial Sequence
  Description of Artificial Sequence: Synthetic peptide
MAINSGFQYIWLVLWCIGIASLFLCSKA

SEQ ID NO: 21 - protein, 6 aa, Artificial Sequence
  Description of Artificial Sequence: Synthetic 6xHis tag
HHHHHH

SEQ ID NO: 22 - DNA, 25 bp, Artificial Sequence
  Description of Artificial Sequence: Synthetic primer
agaaaacttagggctcaggtagtcc

SEQ ID NO: 23 - DNA, 23 bp, Artificial Sequence
  Description of Artificial Sequence: Synthetic primer
tcgtctgtaagggatttctcacc

SEQ ID NO: 24 - DNA, 21 bp, Artificial Sequence
  Description of Artificial Sequence: Synthetic primer
aggacatagcaagccaacagg

SEQ ID NO: 25 - DNA, 25 bp, Artificial Sequence
  Description of Artificial Sequence: Synthetic primer
ggactacctgagccctaagttttct

SEQ ID NO: 26 - DNA, 64 bp, Artificial Sequence
  Description of Artificial Sequence: Synthetic primer
ccggtagttaattaaaacttagggtgcaagatcatcgataatgctctcctaccaagataaggtg

SEQ ID NO: 27 - DNA, 90 bp, Artificial Sequence
  Description of Artificial Sequence: Synthetic primer
ctatttcacactagtgggtatgcctgatgtctgggtgacatcatgtgattggttcactagcagcctcaaggttttgaacggttacaggag

SEQ ID NO: 28 - protein, 7 aa, Artificial Sequence
  Description of Artificial Sequence: Synthetic peptide
DYKDDDD

SEQ ID NO: 29 - protein, 9 aa, Artificial Sequence
  Description of Artificial Sequence: Synthetic peptide
GSSGGSSSG

SEQ ID NO: 30 - protein, 7 aa, Artificial Sequence
  Description of Artificial Sequence: Synthetic peptide
SSGGGGS

SEQ ID NO: 31 - protein, 607 aa, Canine morbillivirus
MLSYQDKAGAFYKDNARANSTKLSLVTEEHGGRRPPYLLFVLLVLLVGILALLAITGVRFHQVSTSNMEFSRLLKEDMEKSEAVHHQVIDVLTPLFKIIGDEIGSRLPQKLNEIKQFILQKTNFFNPNREFDFRDLHWCINPPSKVKVNFTNYCESIGIRKAIASAANPILLSALPGGRSDIFPPHRCSGATTSVGKVFPLSVSLSMSLISRTSEIINMLTAISDGVYGKTYLLAPDDIEREFDTQEIRVFEIGFIKRWLNDMPSLQTTNYMVLPENSKAKVCTIAVGELTLASLCVEESTVLLYHDSSGSQDGILVVTLGIFGTTPMDHIEEVIPVAHPSMEKIHITNHRGFIKDSIATWMVPALASEKQEEQKGCLESACQRKPYPMCNQTSWEPFGGRQLPSYGRLTLPLDASVDLQLNISFTYGPVILNGDGMDYYESPLLNSGWLTIPPKNGTILGLINKAGRGDQFTVIPHVLTFAPMESSGNCYLPIQTSQIIDRDVLIESNLVVLPTQSFRYVIATYDISRSDHAIVYYVYDPIRTISYTHPFRLTTKGRPDFLRIECFVWDDNLWCHQFYRFEANIANSTTSVENLVRIRFSCNRSNP

SEQ ID NO: 32 - protein, 607 aa, Canine morbillivirus
MLSYQDKVGAFYKDNARANPSKLSLVTEEHGGRRPPYLLFVLLILLVGILALLSITGVRFHKVSTSNMEFSRLLKEDMEKSEAVHHQVIDVLTPLFKIIGDEIGLRLPQKLNEIKQFILQKTNFFNPNREFDFRDLHWCINPPSKVKVNFTNYCETIGIRKSIASAANPILLSALSGGRSDIFPPYRCSGATTSVGKVFPLSVSLSMSLISRTSVIINMLTAISDGVYGKTYLLVPDDIEREFDTQEIRVFEIGFIKRWLNDMPLLQTTNYMVLPENSKAKVCTIAVGELTLASLCVEESTVLLYHDSRGSQDGILVVTLGIFGATSMDHIEEVIPVAHPSMEKIHITNHRGFIKDSIATWMVPALASEKQEEQKGCLESACQRKTYPMCNQTSWEPFGGGQLPSYGRLTLPLDASVDLQLNISFTYGPVILNGDGMVYYESPLLNSGWLTIPPKNGTILGLINKASRGDQFTVIPHVLTFAPRESGGNCYLPIQTSQIIDRDVLIESNLVVLPTQSFRYVIATYDISRNDHAIVYYVYDPFRTIFYTYPFRLTTKGRPDFLRIECFVWDDNLWCHQFYRYEANIANSTTSVENLVRIRFSCNRSNP

SEQ ID NO: 33 - protein, 604 aa, Canine morbillivirus
MLPYQDKVGAFYKDNARANSTKLSLVTEGHGGRRPPYLLFVLLILLVGILALLAITGVRFHQVSTSNIEFSRLLKEDMEKSEAVHHQVIDVLTPLFKIIGDEIGLRLPQKLNEIKQFILQKTNFFNPNREFDFRDLHWCINPPSKVKVNFTNYCESIGIRKAIASAANPILLSALSGGRSDIFPPHRCSGATTSVGKVFPLSVSLSMSLISRTSEVINMLTAISDGVYGKTYLLVPDDIEREFDTQEIRVFEIGFIKRWLNDMPLLQTTNYMVLPENSKAKVCTIAVGELTLASLCVEESTVLLYHDSSGSQDGILVVTLGIFWATPMDHIEEVIPVAHPSMEKIHITNHRGFIKDSIATWMVPALASEKQEEQKGCLESACQRKTYPMCNQTSWEPFGGRQLPSYGRLTLPLDASVDLQLNISFTYGPVILNGDGMDYYESPLLNSGWLTIPPKNGTIFGLINKAGRGDQFTVLPHVLTFAPRESSGNCYLPIQTSQIIDRDVLIESNIVVLPTQSFRYVIATYDISRSDHAIVYYVYDPIRTISYTHPFRLTTKGRPDFLRIECFVWDDNLWCHQFYRFEADIANSTTSVENLVRIRFSCNR

SEQ ID NO: 34 - protein, 607 aa, Canine morbillivirus
MLSYQDKVGAFYKDNARANPSKLSLVTEEHGGRRPPYLLFVLLILLVGILALLSITGVRFHKVSTSNMEFSRLLKEDMEKSEAVHHQVIDVLTPLFKIIGDEIGLRLPQKLNEIKQFILQKTNFFNPNREFDFRDLHWCINPPSKVKVNFTNYCDTIGIRKSIASAANPILLSALSGSRSDIFPPYRCSGATTSVGKVFPLSVSLSMSLISRTSVIINMLTAISDGVYGKTYLLVPDDIEREFDTQEIRVFEIGFIKRWLNDMPLLQTTNYMVLPENSKAKVCTIAVGELTLASLCVDESTVLLYHDSRGSQDGILVVTLGIFGATPMDHIEEVIPVAHPSMEKIHITNHRGFIKDSIATWMVPALASEKQEEQKGCLESACQRKTYPMCNQTSWEPFGGGQLPSYGRLTLPLDASVDLQLNISFTYGPVILNGDGMVYYESPLLNSGWLTIPPKNGTILGLINKAGRGDQFTVIPHVLTFAPRESGGNCYLPIQTSQIIDRDVLIESNLVVLPTQSFRYVIATYDISRNDHAIVYYVYDPFRTIFYTYPFRLTTKGRPDFLRIECFVWDDNLWCHQFYRYEANIANSTTSVENLVRIRFSCNRSNP

SEQ ID NO: 35 - protein, 607 aa, Canine morbillivirus
MLSYQDKVGAFYKDNARANSSKLSPVTEEHGGRRPPYLLFVLLILLVGILALLAITGVRFHQVSTSNMEFSRLLKEDMEKSEAVHHQVIDVLTPLFKIIGDEIGLRLPQKLNEIKQFILQKTNFFNPNREFDFRDLHWCINPPSKVKVNFTNYCETIGIRKSIASAANPILLSALSGGRSDIFPPYRCRGATTSVGKVFPLSVSLSMSLISRTSEIINMLTATSDGVYGKTYLLVPDDIEREFDTQEIRVFEIGFIKRWLNDMPLLQTTNYMVLPENSKAKVCTIAVGELTLASLCVEESTVLLYHDSRGSQDGILVVTLGIFGATPMDHIEEVIPVAHPSMEKIHITNHRGFIKDSIATWMVPALASEKQEEQKGRLESACQRKTYPMCNQTSWEPFGGGQLPSYGRLTLPLDASVDLQLNISFTYGPVILNGDGMDYYESPLLNSGWLTIPPKNGTILGLINKASRGDQFTVIPQVLTFAPRESCGNCYLPIQTSQIIDRDVLIESNVVVLPTQSFRYVIATYDISRNDHAIVYYVYDPIRTISYTHPFRLTTKGRPDFLRIECFVWDDNLWCHQFYRYEANIANSTTSVENLVRIRFSCNRSNP

SEQ ID NO: 36 - protein, 607 aa, Canine morbillivirus; identical to SEQ ID NO: 34

SEQ ID NO: 37 - protein, 607 aa, Canine morbillivirus
MLSYQDKVSAFYKDNARANSSKLSLVTEEQGGRRPPYLLFVLLILLVGIMALLAITGVRFHQVSTSNMEFSRLLKEDMEKSEAVHHQVIDVLTPLFKIIGDEIGLRLPQKLNEIKQFILQKTNFFNPNREFDFRDLHWCINPPSKIKVNFTNYCDTIGIRKSIASAANPILLSALSGGRGDIFPPYRCSGATTSVGRVFPLSVSLSMSLISRTSEIINMLTAISDGVYGKTYLLVHDYIEGGFDTQKIRVFEIGFIKRWLNDMPLLQTTNYMVLPENSKAKVCTIAVGELTLASLCVDESTVLLYHDSDGSQDGILVVTLGIFGATPMDQVEEVIPVAHPSVEKIHITNHRGFIKDSIATWMVPALVSEKQEEQKNCLESACQRKSYPMCNQTSWEPFGGGQLPSYGRLTLPLDPSIDLQLNISFTYGPAILNGDGMDYYESPLLDSGWLTIPPKNGTVLGLINKASRGDQSTVIPHVFTFAPRESSGNCYLPIQTSQIMDKDVLTESNLVVLPTQNFRYVIATYDISRGDHAIVYYVYDPIRAISYTYPFRLTTKGRPDFLRIECFVWDDDLWCHQFYRFEADSTNSTTSVENLVRIRFSCNRSKP

SEQ ID NO: 38 - protein, 607 aa, Canine morbillivirus
MLSYQDKVGAFYKDNARANSSKLSLVTEDQGGRRPPYLLFVLLILLVGIMALLAITGVRFHQVSTSNMEFSRLLKEDMEKSEAVHHQVIDVLTPLFKIIGDEIGLRLPQKLNEIKQFILQKTNFFNPNREFDFRDLHWCINPPSKIKVNFTNYCDTIGIRKSIASAANPILLSALSGGRSDIFPPYRCSGATTSVGRVFSLSVSLSMSLISRTSEIINMLTAISDGVYGKTYLLVPDYIEGEFDTQKIRVFEIGFIKRWLNDMPLLQTTNYMVLPENSKAKVCTIAVGELTLASLCVDESTVLLYHDSNGSQDGILVVTLGIFGATPMDQVEEVIPVAHPSVEKIHITNHRGFIKDSIATWMVPALVSGKQEEQKNCLESACQRKSYPMWNQTSWEPFGGGQLPSYGRLTLPLDPSIDLQLNISFTYGPVILNGDGMDYYESPLLDSGWLTIPPKNGTVLGLINKASRGDQFTIIPHVWTFAPRESSGNCYLPIQTSQIMDKDVLTESNLVVLPTQNFIYVIATYDISRGDHAIVYYVYDPIRTISYMYPFRLTTKGRPDFLRIECFVWDDDLWCHQFYRFETDSTNSTTSIENLVRIRFSCNRSKP

SEQ ID NO: 39 - protein, 607 aa, Canine morbillivirus
MLSYQDKVGAFYKDNARANSSKLSSVTEEQGGRRPPYLLFVLLILLVGIMALLAITGVRFHQVSTSNMEFSRLLKEDMEKSEAVHHQVIDVLTPLFKIIGDEIGLRLPQKLNEIKQFILQKTNFFNPNREFDFRYLHWCINPPSKIKVNFTNYCDTIGIRKSIASAANPILLSALSGGRSDIFPPYRCSGATISVGRVFPLSVSLSMSLMSRTSEIINMLTAISNGMYGKTYLLVPDYIEGEFDTQKIRVFEIGFIKRWLNDMPLLQTTNYMVLPENSKAKVCTIAVGELTLASLCVDESTVLLYHDSNGSQDGILVVTLGIFGATPMDQVEEVIPVAHPSVEKIHITNHRGFIKDSIATWMVPALVSEKQEEQKNCLESACQRKSYPMCNQTSWEPFGGGQLPSYGRLTLPLAPSIDLRLNISFTYGPVILNGDGMDYYESPLLDSGWLTIPPKNGTVLGLINKASRGDQFTVIPHVLTFAPRESSENCYLPIQTSQIMDKDVLTESNLVVLPTQNFRYVTATYDISRGDHAIVYYVYDPIRTISYTHPFRLTTQGRPDFLRIECFVWDDDLWCHQFYRFETDSTNSTTSVENLVRIRFSCSRSKP

SEQ ID NO: 40 - protein, 607 aa, Canine morbillivirus
MLSYQDKVGAFYKDNARANSSKLSLVTEEQGGRRPPYLLFVLLILLVGIMALLAITGVRFHQVSTSNMEFSRLLKEDMEKSEAVHHQVIDVLTPLFKIIGDEVGLRLPQKLNEIKQFILQKPNFFNPNREFDFRDLHWCINPPSKIKVNFTNYCDTIGIRKSIASAANPILLSALSGGRSDIFPPYRCSGATTSVGRVFPLSVSLSMSLISRTSEIINMLTAISDGVYGKTYLLVPDYIEGEFDTQKVRVFEIGFIKRWLNDMPLLQTTNYMVLPENSKAKVCTIAVGELTLASLCVDESTILLYHDSNGSQDGILVVTLGIFGATPMDQVEEVIPVAHPSVEKIHITNHRGFIKDSIATWMVPALVSEKQEEQKSCLESACQRKSYPMCNQTSWEPFGGGQLPSYGRLTLPLDPSIDLQLNISFTYGPVILNGNGMDYYESPLLGSGWLTIPPKNGTVLGLINKASRGDQFTVIPHVLTFAPRESSGNCYLPIQTSQIMDKDVLTESNLVVLPTQNFRYVIATYDISRGDHAIVYYVYDPIRTISYTHPFRLTTKGRPDFLRIECFVWDDDLWCHQFYRFEADSTNSTTSVENLVRIRFSCHRSKP

SEQ ID NO: 41 - protein, 607 aa, Canine morbillivirus
MLSYQDKVGAFYKDNARANSSKLSLVTEEQGGRRPPYLLFVLLILLVGIMALLAITGVRFHQVSTSNMEFSRLLKEDMEKSEAVHHQVIDVLTPLFKIIGDEVGLRLPQKLNEIKQFILQKTNFFNPNREFDFRDLHWCINPPSKIKVNFTNYCDTIGIRKSIASAANPILLSAHTGGRGDIFPPYRCSGATTSVGRVFPLSVSLSMSLISRTSEIINMLTAISDGVYGKTYLLVPDYIEGEFDTQKIRVFEIGFIKRWLNDMPLLQTTNYMVLPENSKAKVCTIAVGELTLASLCVDESTILLYHDSNGSQDGILVVTLGIFGATPMDQVEEVIPVAHPSVEKIHITNHRGFIKDSIATWMVPALVSEKQEEQKSCLESACQRKSYPMCNQTSWEPFGGGQLPSYGRLTLPLDPSIDLQLNISFTYGPVILNGNGMDYYESPLLGSGWLTIPPKNGTVLGLINKAGRGDQFTVIPHVLTFAPRESSGNCYLPIQTSQIMDKDVLTESNLVVLPTQNFRYVIATYDISRGDHAIVYYVYDPIRTISYTHPFRLTTKGRPDFLRIECFVWDDDLWCHQFYRFETDSTNSTTSVENLVRIRFSCSRSKP

SEQ ID NO: 42 - protein, 607 aa, Canine morbillivirus
MLSYQDKVGAFYKDNARANSSRLSLVTEDQGGRRPPYLLFVLLILLVGIMALLAITGVRFHQVSTSNMEFSRLLKEDMEKSEAVHHQVIDVLTPLFKIIGDEIGLRLPQKLNEIKQFILQKTNFFNPNREFDFRDLHWCINPPSKIKVNFTNYCDTIGIRKSIASAANPILLSALSRSRGDIFPPYRCSGATTSVGSVFPLSVSLSMSLISRTSEIINMLTAISDGVYGKTYLLVPDYLEGEFDTQKIRVFEIGFIKRWLNNMPLLQTTNYMVLPENSKAKVCTIAVGELTLASLCVDESTVLLYHDSNGSQGGILVVTLGIFGATPMDQVEEVIPVPHPSVEKIHITNHRGFIKDSIATWMVPALVSEKQEEQKNCLESACQRKSYPMCNQTSWEPFGGGQLPSYGRLTLPLDPSIDLQLNISFTYGPVILNGDGMDYYESPLLDSGWLTIPPKNGTVLGLINKASRGDQFTVIPHVLTFAPRESSGNCYLPIQTSQIMDKDVLTESNLVVLPTQNFIYVIATYDISRGDHAIVYYVYDPIRTISYTHAFRLTTKGRPDFLRIECFVWDDDLWCHQFYRFEADSTNSTTSVENLVRIRFSCNRSKP

SEQ ID NO: 43 - protein, 607 aa, Canine morbillivirus
MLSYQDKVGAFYKDNARANSSKLSLVTEEQGGRRPPYLLFVLLILLVRILALLAITGVRFHQVSTSNVEFSRLLKEDMEKSEAVHHQVIDVLTPLFRIIGDEIGLRLPQKLNEIKQFILQKTNFFNPNREFDFRDLHWCVNPPSKIKVNFTNYCDTIGIRKSIASAANPILLSALSGGRGDIFPPYRCSGAATSVGRVFPLSVSLSMSLISRKSEIINMLTAISNGVYGKTYLLVLDYIEEEFDTQKIRVFEIGFIKRWLNDMPLLQTTNYMVLPENSKAKVCTIAVGELTLASVCVGESTVLLYHDSNGSQDSILAVTLGIFGATSMDQVEEVIPVAHPSVEKIHITNHRGFIKDSIATWMVPALVSEKQEEQKNCLESACQRKTYPMCNQTSWEPFGGGQLPSYGRLTLPLDPRTDLQLNISFTYGPVILNGDGMDYYESPLSDSGWLTIPPKNGTVLGLINKASRGDQFIVIPHVLTFAPRESSGNCYLPIQTSQIMDKDVLTESNLVVLPTQNFRYVIATYDITRDNHAIVYYVYDPIRTISYTYPFRLTTKGRPDFLRIECFVWDDDLWCHQFYRFEADITNSTISVETLDPIRSSCKRSGP

SEQ ID NO: 44 - protein, 607 aa, Canine morbillivirus
MLSYQDKVGAFYKDNARANSSKLSLVTEEQGGRRPPYLLFVLLILLVGILALLAITGVRFHQVSTSNVEFSRLLKEDMEKSEAVHHQVIDVLTPLFKIIGDEIGLRLPQKLNEIKQFILQKTNFFNPNREFDFRDLHWCINPPSKIKVNFTNYCDTIGIRKSIASAANPILLSALSGGRGDIFPPYRCSGAATSVGRVFPLSVSLSMSLISRKSEIINMLTAISNGVYGKTYLLVPDYIEEEFDTQKIRVFEIGFIKRWLNDMPLLQTTNYMVLPENSKAKVCTIAVGELTLASVCVGESTVLLYHDSNGSQDSILAVTLGIFGATSMDQVEEVIPVAHPSVEKIHITNHRGFIKDSIATWMVPALVSEKQEEQKNCLESACQRKSYPMCNQTSWEPFGGGQLPSYGRLTLPLDPSTDLQLNISFTYGPVILNGDGMDYYESPLSDSGWLTIPPKNGTVLGLINKASRGDQFIVIPHVLTFAPRESSGNCYLPIQTSQIMDKDVLTESNLVVLPTQNFRYVIATYDISRDNHAIVYYVYDPIRTISYTYPFRLTTKGRPDFLRIECFVWDDDLWCHQFYRFEADITNSTTSVENLVRIRFSCSRSRP

SEQ ID NO: 45 - protein, 607 aa, Canine morbillivirus
MLSYQDKVGAFYKDNARANSSKLSLVTEEQGGRRPPYLLFVLLILLVGILALLTITGVRFHQVSTSNVEFSRLLKEDMEKSEAVHHQVIDVLTPLFKIIGDEIGLRLPQKLNEIKQFILQKTNFFNPNREFDFRDLHWCINPPSKIKVNFTNYCDTIGIRKSIASAANPILLSALSGGRGDIFPPYRCSGAATSVGRVFPLSVSLSMSLTSRKSEIINMLTAISNGVYGKTYLLVPDYIEEEFDTQKIRVFEIGFIKRWLNDMPLLQTTNYMVLPENSKAKVCTIAVGELTLASLCVGESTVLLYHDSNGSQDSILAVTLGIFGATSMDQVEEVIPVAHPSVEKIHITNHRGFIKDSIATWMVPALVSEKQEEQRNCLESACQRKSYPMCNQTSWEPFGGGQLPSYGRLTLPLDPSTDLQLNISFTYGPVILNGDGMDYYESPLSDSGWLTIPPKNGTVLGLINKASRGDQFIVIPHVLTFAPRESSGNCYLPIQTSQIMDKDVLTESNLVVLPTQNFRYVIATYDISRDNHAIVYYVYDPIRTISYTHPFRLTTKGRPDFLRIECFVWDDDLWCHQFYRFEADITNATTSVENLVRIRFSCNRSRP

SEQ ID NO: 46 - protein, 607 aa, Canine morbillivirus
MLSYQDKVGAFYKDNARANSSKLYLVTEEQGGRRPPYLLFVLLILLVGILALLTITGVRFHQVSTSNVEFSRLLKEDMEKSEAVHHQVIDVLTPLFKIIGDEIGLRLPQKLNEIKQFILQKTNFFNPNREFDFRDLHWCINPPSKIKVNFTNYCDTIGIRKSIASAANPILLSALSGGRGDIFPPYRCSGAATSVGRVFPLSVSLSMSLTSRKSEIINMLTAISNGVYGKTYLLVPDYIEEKFDTQKIRVFEIGFIKRWLNDMPLLQTTNYMVLPENSKAKVCTIAVGELTLASLCVGESTVLLYHDSNGSQDSILAVTLGIFGATSMDQVEEVIPVAHPSVEKIHITNHRGFIKDSIATWMVPALVSEKQEEQKNCMESACQRKSYPMCNQTSWEPFGGGQLPSYGRLTLPLDPSTDLQLNISFTYGPVILNGDGMDYYESPLSDSGWLTIPPKNGTVLGLINKASRGDQFIVIPHVLTFAPRESSGNCYLPIQTSQIMDKDVLTESNLVVLPTQNFRYVIATYDISRDNHAIVYYVYDPIRTISYMYPFRLTTKGRPDFLRIECFVWDDDLWCHQFYRFEADITNATTSVENLVRIRFSCNRSRP

SEQ ID NO: 47 - protein, 601 aa, Canine morbillivirus
MLSYQDKVGAFYKDNARANSSKLSLVTEEQGGRRPPYLLFVLLILLVGILALLAITGVRFHQVSTSNVEFSRLLKEDMEKSEAVHHQVIDVLTPLFKIIGDEIGLRLPQKLNEIKQFILQKTNFFNPNREFDFRDLHWCINPPSKIKVNFTNYCDTIGIRKSIASAANPILLSALSGGRGDIFPPYRCSGAATSVGRVFPLSVSLSMSLISRKSEIINMLTAISNGVYGKTYLLVPDYIEEEFDTQKIRVFEIGFIKRWLNDMPLLQTTNYMVLPENSKAKVCTIAVGELTLASLCVGESTVLLYHDSNGSQDSILAVTLGIFGATSIDQVEEVIPVAHPSVEKIHITNHRGFIKDSIATWMVPALVSEKQEEQKNCLESACQRKSYPMCNQTSWEPFGGGQLPSYGRLTLPLDPSTDLQLNISFTYGPVILNGDGMDYYESPLSDSGWLTIPPKNGTVLGLINKASRGDQFIVIPHVLTFAPRESSGNCYLPIQTSQIMDKDVLTESNLVVLPTQNFRYVIATYDISRDNHAIVYYVYDPIRTISYTYPFRLTTKGRPDFLRIECFVWDDDLWCHQFYRFEADITNSTTSVENLVRIRFS

SEQ ID NO: 48 - protein, 607 aa, Canine morbillivirus
MLSYQDKVGAFYKDNARANSSKLSLVTEEQGGRRPPYLLFVLLILLVGILALLTITGVRFHQVSTSNVEFSRLLKEDMEKSEAVHHQVIDVLTPLFKIIGDEIGLRLPQKLNEIKQFILQKTNFFNPNREFDFRDLHWCINPPSKIKVNFTNYCDTIGIRKSIASAANPILLSALSGGRGDIFPPYRCSGAATSVGRVFPLSVSLSMSLTSRKSEIINMLTAISNGVYGKTYLLVPDYIEEKFDTQKIRVFEIGFIKRWLNDMPLLQTTNYMVLPENSKAKVCTIAVGELTLASLCVGESTVLLYHDSNGSQDSILAVTLGIFGATSMDQVEEVIPVAHPSVEKIHITNHRGFIKDSIATWMVPALVSEKQEEQKNCLESACQRKSYPMCNQTSWEPFGGGQLPSYGRLTLPLDPSTDLQLNISFTYGPVILNGDGMDYYESPLSDSGWLTIPPKNGTVLGLINKASRGDQFIVIPHVLTFAPRESSGNCYLPIQTSQIMDKDVLTESNLVVLPTQNFRYVIATYDISRDNHAIVYYVYDPIRTISYMYPFRLTTKGRPDFLRIECFVWDDDLWCHQFYRFEADITNATTSVENLVRIRFSCNRSRP

SEQ ID NO: 49 - protein, 607 aa, Canine morbillivirus
MLSYRDKVDAFYKDNARANLSKLSLVTEEQGGRRPPYLLFVLLILLVGIMALLAITGVRFHQVSTSNMEFSRLLKEDLEKSEAVHHQVIDVLTPLFKIIGDEIGLRLPQKLNEIKQFILQKTNFFNPNREFDFRDLHWCINPPSKIKVNFTNYCDTIGIRKSIASAANPILLSALSGGRGDIFPPYRCNGATISVGKIFPLSVSLSMSLISRTSEIINMLTAISDGVYGKTYLLMPDYIEGEFDTQKIRVFEIGFIKRWLNDMPLLQTTNYMVLPENSKAKVCTIAVGELTLASLCVDESTVLLYHDSNGSQDGVLVVTLGIFGATSMDQVEEVIPVADPLVEKIHITNHRGIIKDSIATWMVPALVSEKQEEQKNCLESACQRKSYPMCNQTSWEPFGGGQLPSYGRLTLPLDPSIDLQLNISFTYGPIILNGDGMDYYESPLLDSGWLTIPPKNGTVLGLINKASRGDQFTVIPHVLTFAPRESSGNCYLPIQTSQIMDKDVLTESNLVVLSTQNFRYVVATYDISRDDHAIVYYVYDPIRTISYTYPFRLTTKGRPDFLRIECFVWDDDLWCHQFYRFEADITNSTTSVENLVRMRFSCNRSKP

SEQ ID NO: 50 - protein, 80 aa, Canine morbillivirus
MLSYQDKVGAFYKDNARANSSRLSLVTEDQGGRRPPYLLFVLLILLVGIMALLAITGVRFHQVSTSNMEFSRLLKEDMEK

SEQ ID NO: 51 - protein, 607 aa, Canine morbillivirus; identical to SEQ ID NO: 42

SEQ ID NO: 52 - protein, 607 aa, Canine morbillivirus
MLSYQDKVGAFYKDNARANSSRLSLVTEEQGGKRPPYLLFVLLILLVGIMALLAITGVRFHQVSTSNMEFSRLLKEDMEKSEAVHHQVIDVLTPLFKIIGDEIGLRLPQKLNEIKQFILQKTNFFNPNREFDFRDLHWCINPPSKIKVNFTNYCDTIGIKKSIASAANPILLSALSGGRGDVFPSYRCSGATTSVGRVFPLSVSLSMSLISRTSEIINMLTAISDGVYGKTYLLVPDYLEGEFDMQKIRVFEIGFIKRWLNNMPLLQTTNYMVLPEDSKAKVCTIAVGELTLASLCVDESTVLLYHDSNGSQDSILVVTLGIFGATPMDQVEEVIPVAHPSVEKIHIANHRGFIKDSIATWMVPALVSEKQEEQKNCLESACQRRSYPMCNQTSWEPFGGGQLPSYGRLTLPLDPSIDLQLNISFTYGPVILNGDGMDYYESPLLNSGWLTIPPKNGTVLGLINKASRGDQFTVIPHVLTFAPRESSGNCYLPIQTSQIMDKDVLTESNLMVLPTQNFRYVIATYDISRGDHAIVYYVYDPIRTISYTYPFRLTTKGRPDFLRIECFVWDDDLWCHQFYRFETDSTNSTTSVENLVRIRFSCNRSKP

SEQ ID NO: 53 - protein, 607 aa, Canine morbillivirus
MLSYQDKVGAFYKDNARANSSRLSLVTEEQGGRRPPYLLFVLLILLVGIMALLAITGVRFHQVSTSNMEFSRLLKEDMEKSEAVHHQVIDVLTPLFKIIGDEIGLRLPQKLNEIKQFILQKTNFFNPNREFDFRDLHWCINPPSKIKVNFTNYCDTIGIKKSIASAANPILLSALSGGRGDVFPSYRCSGATTSVGRVFPLSVSLSMSLISRTSEIINMLTAISDGVYGKTYLLVPDYLEGEFDMQKIRVFEIGFIKRWLNNMPLLQTTNYMVLPEDSKAKVCTIAVGELTLASLCVDESTVLLYHDSNGSQDSILVVTLGIFGATPMDQVEEVIPVAHPSVEKIHIANHRGFIKDSIATWMVPALVSEKQEEQKNCLESACQRRSYPMCNQTSWEPFGGGQLPSYGRLTLPLDPSIDLQLNISFTYGPVILNGDGMDYYESPLLNSGWLTIPPKNGTVLGLINKASRGDQFTVIPHVLTFAPRESSGNCYLPIQTSQIMDKDVLTESNLMVLPTQNFRYVIATYDISRGDHAIVYYVYDPIRTISYTYPFRLTTKGRPDFLRIECFVWDDDLWCHQFYRFETDSTNSTTSVENLVRIRFSCNRSKP

SEQ ID NO: 54 - protein, 607 aa, Canine morbillivirus
MLSYQDKVGAFYKDNARANSSRLSLVTEEQGGRRPPYLLFVLLILLVGIMALLAITGVRFHQVSTSNMEFSRLLKEDMEKSEAVHHQVIDVLTPLFKIIGDEIGLRLPQKLNEIKQFILQKTNFFNPNREFDFRDLHWCINPPSKIKVNFTNYCDTIGIKKSIASAANPILLSALSGGRGDVFPSYRCSGATTSVGRVFPLSVSLSMSLISRTSEIINMLTAISDGVYGKTYLLVPDYLEGEFDMQKIRVFEIGFIKRWLNNMPLLQTTNYMVLPEDSKAKVCTIAVGELTLASLCVDESTVLLYHDSNGSQDSILVVTLGIFGATPMDQVEEVIPVAHPSVEKIHIANHRGFIKDSIATWMVPALVSEKQEEQKNCLESACQRRSYPMCNQTSWEPFGGGQLPSYGRLTLPLDPSIDLQLNISFTYGPVILNGDGMDYYESPLLNSGWLTIPPKNGTVLGLINKASRGDQFTVIPHVLTFAPRESRGNCYLPIQTSQIMDKDVLTESNLMVLPTQNFRYVIATYDISRGDHAIVYYVYDPIRTISYTYPFRLTTKGRPDFLRIECFVWDDDLWCHQFYRFETDSTNSTTSVENLVRIRFSCNRSKP

SEQ ID NO: 55 - protein, 607 aa, Canine morbillivirus
MLSYQDKVSAFYKDNARANSSKLSLVTEEQGGRRPPYLLFVLLILLVGIMALLAITGVRFHQVSTSNMEFSRLLKEDMEKSEAVHHQVIDVLTPLFKIIGDEIGLRLPQKLNEIKQFILQKTNFFNPNREFDFRDLHWCINPPSKIKVNFTNYCDTIGIRKSIASAANPILLSALSGGRGDIFPPYRCSGATTSVGRVFPLSVSLSMSLISRTSEIINMLTAISDGVYGKTYLLVPDYIEGGFDTQKIRVFEIGFIKRWLNDMPLLQTTNYMVLPENSKAKVCTIAVGELTLASLCVDESTVLLYHDSDGSQDGILVVTLGIFGATPMDQVEEVIPVAHPSVEKIHITNHRGFIKDSIATWMVPALVSEKQEEQKNCLESACQRKSYPMCNQTSWEPFGGGQLPSYGRLTLPLDPSIDLQLNISFTYGPVILNGDGMDYYESPLLDSGWLTIPPKNGTVLGLINKASRGDQFTVIPHVLTFAPRESSGNCYLPIQTSQIMDKDVLTESNLVVLPTQNFRYVIATYDISRGDHAIVYYVYDPIRAISYTYPFRLTTKGRPDFLRIECFVWDDDLWCHQFYRFEADSTNSTTSVENLVRIRFSCNRSKP

SEQ ID NO: 56 - protein, 607 aa, Canine morbillivirus; identical to SEQ ID NO: 38

SEQ ID NO: 57 - protein, 607 aa, Canine morbillivirus
  MOD_RES (295)..(295): Any amino acid
MLSYQDKVGAFYKDNARANLSKLSLVTEEQGGRRPPYLLFVLLILLVGVLALLAITGVRFHQVSINNMEFSRLLKEDMEKSDAVHHQVIDVLTPLFKIIGDEIGLRLPQKLNEIKQFILQKTNFFNPNREFDFRDLHWCINPPSKIKVNFTSYCDTIGIRKSIALAANPILLSALSGGRGDIFPPYRCSGATTSIGKSFPLSVSLSMSLISRTSEIINMLTSISDGVYGKTYLLVPDYIEGEFDTQKIRVFEIGFIKRWLNDMPLFQTTNYMTLPENSKTKVCTIAVGELTLASXCVDESTVLLYHDSNDSQDGILVVTLGIFGATPMDQVEEVIPVAHPSVEKIHITNHRGFIKDSVATWMVPALVSENLEEQKNCLESACQRKSYPMCNQTSWEPFGGGQLPSYGRLTLHLDASTDRQLNISFTYGPVILNGNGMDYYESPLMDSGWLTIPPKNGTILGLINKASRGDQFTVIPHVLSFAPRESSGNCYLPIQTSQIMDKDVLTESNLVVLPTQNFRYVIATYDISRNDHAIVYYVYDPIRTISYTHPFRLTTKGRSDFLRIECFVWDDDLWCHQFYRFEADITNSTTSVENLVRIRFSCNRSKP

SEQ ID NO: 58 - protein, 607 aa, Canine morbillivirus
MLSYQDKVGAFYKDNARANLSKLSLVTEEQGGRRPPYLLFVLLILLVGILALLAITGVRFHQVSTSNMEFSRLLKEDMEKSDAVHHQVIDVLTPLFKIIGDEIGLRLPQKLNEIKQFILQKTNFFNPNREFDFRDLHWCINPPSKIKVNFTNYCDTIGIRKSIALAANPILLSALSGGRSDIFPPYRCSGATTSVGKSFPLSVSLSMSLISRTAEIINMLTSISDGVYGKTYLLVPDYIEGEFDTQKIRVFEIGFIKRWLNDMPLFQTTNYMVLPENSKAKVCTIAVGELTLASLCADESTVLLYHDGNGSQDGILVVTLGIFGATPMDQVEEVIPVAHPSVEKIHITNHRGFIKDSVATWMVPALVSENLEEQKNCLESACQRKSYPMCNQTSWEPFGGGQLPSYGRLTLPLDASIDRQLNISFTYGPVILNGDGMDYYESPLLDSGWLTIPPKNGTILGLINKASRGDQFTVIPHVLSFAPRESSGNCYLPIQTSQIMDKDVLTESNLVVLPTQNFRYVIATYDISRNDHAIVYYVYDPIRTISYTYPFRLTTKGRPDFLRIECFVWDDDLWCHQFYRFEADITNSTTSVENLVRIRFSCNRSKP

SEQ ID NO: 59 - protein, 607 aa, Canine morbillivirus
MLSYQDKVGAFYKDNARANLSKLSLVTEEQGGRRPPYLLFVLLILLVGILALLAITGVRFHQVSISNMEFSRLLKEDMEKSDAVHHQVIDVLTPLFKIIGDEIGLRLPQKLNEIKQFILQKTNFFNPNREFDFRDLHWCINPPSKIKVNFTSYCDTIGIRKSIALAANPILLSALSGGRGDIFPPYRCSGATTSIGKSFPLSVSLSMSLISRTSEIINMLTSISDGVYGKTYLLVPDYIEGEFDTQKIRVFEIGFIKRWLNDMPLFQTTNYMILPENSKTKVCTIAVGELTLASLCVDESTVLLYHDSNDSQDGILVVTLGIFGATPMDQVEEVIPVAHPSVEKIHITNHRGFIKDSVATWMVPALVSENLEEQKNCLESACQRKSYPMCNQTSWEPFGGGQLPSYGRLTLHLDASTDRQLNISFTYGPVILNGNGMDYYESPLMDSGWLTIPPKNGTILGLINKASRGDQFTVIPHVLSFAPRESSGNCYLPIQTSQIMDKDVLTESNLVVLPTQNFRYVIATYDISRNDHAIVYYVYDPIRTISYTYPFRLTTKGRSDFLRIECFVWDDDLWCHQFYRFEADITNSTTSVENLVRIRFSCNRSKP

SEQ ID NO: 60 - protein, 607 aa, Canine morbillivirus
MLSYQDKVGAFYKDNARANLSKLSLVTEEQGGRRPPYLLFVLLILLVGILALLAITGVRFHQVSISNMEFSRLLKEDMEKSDAVHHQVIDVLTPLFKIIGDEIGSRLPQKLNEIKQFILQKTNFFNPNKEFDFRDLHWCINPPSKVKVNFTNYCDTIGIRKSIALAANPILLSALSGGRSDIFPPHRCSGATTSVGKSFPLSVSLSMSLISRTSEIINMLTSISDGVYGKTYLLVPDYIEGEFDTQKIRVFEIGFIKRWLNDMPLFQTTNYMILPENSKTKVCTIAVGELILASLCVEESTVLLYHDSNGSQGGILVVTLGIFGATPMDQVEEVIPVAHPSVKKIHITNHRGFIKDSVATWMVPALVSENLEEQKNCLESACQRKSYPMCNQTSWEPFGGGQLPSYGRLTLPLDASIDRQLNISFTYGPVILNGDGMDYYESPLLDSGWLTIPPKNGTILGLINKASRGDQFTVIPHVLSFAPRESSGNCYLPIQTSQIMDKDVLTESNLVVLPTQNFRYVIATYDISRGDHAIVYYVYDPIRTISYTYPFRLTTKGRPDFLRIECFVWDDDLWCHQFYRFEADITNSTTSVENLVRIRFSCNRSKP

SEQ ID NO: 61 - protein, 607 aa, Canine morbillivirus
MLSYQDKVGAFYKDNARANLSKLSLVTEGQGGRRPPYLLFVLLILLVGILALLAITGVRFHQVSISNMEFSRLLKEDMEKSDAVHHQVIDVLTPLFKIIGDEIGLRLPQKLNEIKQFILQKTNFFNPNREFDFRDLHWCINPPSKIKVNFTSYCDTIGIRKSIALAANPVLLSALSGGRGDIFPPYRCSGATTSVGKSFPLSVSLSMSLISRTSEIINMLTSISDGVYGKTYLLVPDYIEGEFDTQKIRVFEIGFIKRWLNDMPLFQTTNYMILPENSKTKVCTIAVGELTLASLCVDESTVLLYHDSNGSQDGILVVTLGIFGATPMDQVEEVIPVAHPSVEKIHITNHRGFIKDSVATWMVPALVSENLEEQENCLESACQRKSYPMCNQTSWEPFGGGQLPSYGRLTLHLDASIDRQLNISFTYGPVILNGDGMDYYESPLLDSGWLTIPPKNGTILGLINKASRGDQFTVIPHVLSFAPRESSGNCYLPIQTSQIMDKDVLTESNLVVLPTQNFRYVIATYDISRNDHAIVYYVYDPIRTISYTYPFRLTTKGRPDFLRIECFVWDDDLWCHQFYRFEADINNSTTSVENLVRIRFSCNRSKP

SEQ ID NO: 62 - protein, 607 aa, Canine morbillivirus
MLSYQDKVGAFYKDNARANLSKLSLVTEEQGGRRPPYLLFVLLILLVGILALLAITGVRFHQVSISNMEFSRLLKEDMEKSDAVHHQVIDVLTPLFKIIGDEIGLRLPQKLNEIKQFILQKTNFFNPNREFDFRDLHWCINPPSKIKVNFTSYCDTIGIRKSIALAANPILLSALSGGRGDIFPPYRCSGATTSVGKSFPLSVSLSMSLISRTSEIINMLTSISDGVYGKTYLLVPDYIEGEFDTQKIRVFEIGFIKRWLNDMPLFQTTNYMILPENSKTKVCTIAVGELTLASLCVDESTVLLYHDSNGSQDGILVVTLGIFGATPMDQVEEVIPVAHPSVEKIHITNHRGFIKDSVATWMVPALVSENLEEQKNCLESACQRKSYPMCNQTSWEPFEGGQLPSYGRLTLHLDASIDRQINISFTYGPVILNGDGMDYYESPLLDSGWLTIPPKNGTILGLINKASRGDQFTVIPHVLSFAPRESSGNCYLPIQTSQIMDRDVLTESNLVVLPTQNFRYVIATYDISRNDHAIVYYVYDPIRTISYTYPFRLTTKGRPDFLRIECFVWDDDLWCHQFYRFEADITNSTTSVENLVRIRFSCNRSKP

SEQ ID NO: 63 - protein, 607 aa, Canine morbillivirus
MLSYQDKVGAFYKDNARANLSKLSLVTEEQGGRRPPYLLFVLLILLVGILALLAITGVRFHQVSTSNMEFSRLLKEDMEKSDAVHHQVIDVLTPLFKIIGDEIGLRLPQKLNEIKQFILQKTNFFNPNREFDFRDLHWCINPPSKIKVNFTNYCDTIEIRKSIALAANPILLSALSGGRGDIFPPYRCSGVTTSVGESFPLSVSLSMSLISRTSEIINMLTSISDGVYGKTYLLVPDYIEGEFDTQKIRVFEIGFIKRWLNDMPLFQTTNYMILPENSKAKVCTIAVGELTLASLCVDESTVLLYHDSNGSQDGILVVTLGIFGATPMDQVEEVIPVAHPSVEKIHITNHRGFIKDSVATWMVPALVSENLEEQKNCLESACQRKSYPMCNQTSWEPFGGGQLPSYGRLTLPLDVSIDLQLNISFTYGPVILNGDGMDYYESPLLDSGWLTIPPKNGTILGLINKASRGDQFTVIPHVLTFAPRESSGNCYLPIQTSQIMDKDVLTESNLVVLPTQNFRYVIATYDISRNDHAIVYYVYDPIRTISYTYPFRLTTKGRPDFLRIECFVWDGDLWCHQFYRFEADITNSTTSVENLVRIKFSCNRSKP

SEQ ID NO: 64 - protein, 607 aa, Canine morbillivirus; identical to SEQ ID NO: 2

SEQ ID NO: 65 - protein, 607 aa, Canine morbillivirus
MLSYQDKVGAFYKDNARANSSKLSLVTEEQGGRRPPYLLFVLLILLVGIMALLAITGVRFHQVSTSNMEFSRLLKEDMEKSEAVHHQVIDVLTPLFKIIGDEIGLRLPQKLNEIKQFILQKTNFFNPNREFDFRDLHWCINPPSKIKVNLTNYCDTIGLRKSIASAANPILLSALSRGRGDIFPPYRCSGATTSVGRFFPLSVSLSMSLISRTSEIINMLTAISDGVYGKTYLLVPDYIEGEFDTQKIRVFEIGFIKRWLNDMPLLQTTNYMVLPENSKAKVCTIAVGELTLASLCVDESTVLLYHDSNGSQDGILVVTLGIFGATPMDQVEEVIPVAHPSVEKIHITNHRGFIKDSIATWMVPALVSEKQEEQKNCLESACQRKSYPMCNQTSWEPFGGGQLPSYGRLTLPLDPSIDLQLNISFTYGPVILNGDGMDYYESPLLDSGWLTIPPKNGTVLGLINKASRGDQFTVIPHVLTFAPRESSGNCYLPIQTFQIMDKDVLTESNLVVLPTQNFRYVIATYDISRDDHAIVYYVYDPIRTISFTYPFRLTTKGRPDFLRIECFVWDDDLWCHQFYRFEADITNFTTSVENLVRIRFSCNRSKP

SEQ ID NO: 66 - protein, 607 aa, Canine morbillivirus
MLSYQDKVGAFYKDNARANSSKLSLVTEEQGGRRPPYLLFVLLILLVGIMALLAITGVRFHQVSTSNMEFSRLLKEDMEKSEAVHHQVIDVLTPLFKIIGDEIGLRLPQKLNEIKQFILQKTNFFNPNREFDFRDLHWCINPPSKIKVNLTNYCDTIGLRKSIASAANPILLSALSRGRGDIFPPYRCSGATTSVGRFFPLSVSLSMSLISRTSEIINMLTAISDGVYGKTYLLVPDYIEGEFDTQKIRVFEIGFIKRWLNDMPLLQTTNYMVLPENSKAKVCTIAVGELTLASLCVDESTVLLYHDSNGSQDGILVVTLGIFGATPMDQVEEVIPVAHPSVEKIHITNHRGFIKDSIATWMVPALVSEKQEEQKNCLESACQRKSYPMCNQTSWEPFGGGQLPSYGRLTLPLDPSIDLQLNISFTYGPVILNGDGMDYYESPLLDSGWLTIPPKNGTVLGLINKASRGDQFTVIPHVLTFAPRESSGNCYLPIQTFQIMDKDVLTESNLVVLPTQKFRYVIATYDISRDDHAIVYYVYDPIRKISFTYPFRLTTKGRPDFLRIECFVWDDDLWCHQFYRFEADITDSTTSVENLVRIRFSCNRSKP

SEQ ID NO: 67 - protein, 607 aa, Canine morbillivirus
MLSYQDKVGAFYKDNARANSSKLSLVTEEQGGRRPPYLLFVLLILLVGIMALLAITGVRFHQVSTSNMEFSRLLKEDMEKSEAVHHQVIDVLTPLFKIIGDEIGLRLPQKLNEIKQFILQKTNFFNPNREFDFRDLHWCINPPSKIKVNLTNYCDTIGLRKSIASAANPILLSALSRGRGDIFPPYRCSGATTSVGRFFPLSVSLSMSLISRTSEIINMLTAISDGVYGKTYLLVPDYIEGEFDTQKIRVFEIGFIKRWLNDMPLFQTTNYMLLPENSKAKVCTIAVGELTLASLCVDESTVLLYHDSNGSQDGILVVTLGIFGATPMDQVEEVIPVAHPSVEKIHITNHRGFIKDSVATWMVPALVSENLEEQENCLESACQRKSYPMCNQTSWEPFGGGQLPSYGRLTLHLDPSIDLQLNISFTYGPVILNGDGMDYYESPLLDSGWLTIPPKNGTVLGLINKASRGDQFTVIPHVLTFAPRESSGNCYLPIQTFQIMDKDVLTESNLVVLPTQNFRYVIATYDISRDDHAIVYYVYDPIRKISFTYPFRLTTKGRPDFLRIECFVWDDDLWCHQFYRFEADITNFPTSVENLVRIRFSCNRSKP

SEQ ID NO: 68 - protein, 607 aa, Canine morbillivirus
MLSYQDKVGAFYKDNARANSSKLSLVTEEQGGRRPPYLLFVLLILLVGIMALLAITGVRFHQVSTSNMEFSRLLKEDMEKSEAVHHQVIDVLTPLFKIIGDEIGLRLPQKLNEIKQFILQKTNFFNPNREFDFRDLHWCINPPSKIKVNLTNYCDTIGLRKSIASAANPILLSALSRGRGDIFPPYRCSGATTSVGRFFPLSVSLSMSLISRTSEIINMLTAISDGVYGKTYLLVPDYIEGEFDTQKIRVFEIGFIKRWLNDMPLLQTTNYMVLPENSKAKVCTIAVGELTLASLCVDESTVLLYHDSNGSQDGILVVTLGIFGATPMDQVEEVIPVAHPSVEKIHITNHRGFIKDSIATWMVPALVSEKQEEQKNCLESACQRKSYPMCNQTSWEPFGGGQLPSYGRLTLPLDPSIDLQLNISFTYGPVILNGDGMDYYESPLLDSGWLTIPPKNGTVLGLINKASRGDQFTVIPHVLTFAPRESSGNCYLPIQTFQIMDKDVLTESNLVVLPTQNFRYVIATYDISRDDHAIVYYVYDPIRKISFTYPFRLTTKGRPDFLRIECFVWDDDLWCHQFYRFEADITNFTTSVENLVRIRFSCNRSKP

SEQ ID NO: 69 - protein, 607 aa, Canine morbillivirus
MLSYQDKVGAFYKDNARANSSKLSSVTEEQGGRRPPYLLFVLLILLVGIMALLAITGVRFHQVSTSNMEFSRLLKEDMEKSEAVHHQVIDVLTPLFKIIGDEIGLRLPQKLNEIKQFILQKTNFFNPNREFDFRDLHWCINPPSKIKVNFTNYCDTIGIRKSIASAANPILLSALSGGRSDIFPPYRCSGAATSVGRVFPLSVSLSMSLISRTSEIINMLTAISDGVYGKTYLLVPDYIEGEFDTQKIRVFEIGFIKRWLNDMPLLPTTNYMVLPENSKAKVCTIAVGELTLASLCVGESTVLLYHDSNGSQDGVLVVTLGIFGATPMDQVEEVIPVAHPSVEKIHITNHRGFIKDSIATWMVPALVSEKQEEQKNCLESACQRKSYPMCNQTSWEPFGGGQLPSYGRLTLPLDPGIDLQLNISFTYGPVILNGDGMDYYESPLLDSGWLTIPPKNGTVLGLINKASRGDRFTVTPHVLTFAPRESSGNCYLPIQTSQIMDRDVLTESNLVVLPTQNFRYVIATNDISRDDHAIVYYVYDPIRTISYTYPFRLTTKGRPDFLRIECFVWDDDLWCHQFYRFEADITNSTTSVENLVRIRFSCNRSKP

SEQ ID NO: 70 - protein, 607 aa, Canine morbillivirus
MLSYHDKVGAFYKDNARANSSKLSLVTEEQGGRRPPFLLFVLLVLLVGIMALLAITGVRFHQVSTSNMEFSRLLKEDMEKSEAVHHQVIDVLTPLFKIIGDEIGLRLPQKLSEIKQFILQKTNFFNPNREFDFRDLHWCINPPSKIKVNFTNYCDTIGIRKSIASAANPILLSALSGGRGDIFPPYRCNGAATSAGRVFPLSVSLSMSLISRTSEIINMLTAISDGVYGKTYLLVPDYIEGEFDTQKIRVFEIGFIKRWLNDMPLLQTTNYMVLPEDSKAKVCTIAVGELTLASLCVDESTVLLYHDSDGSQDGILVVTLGIFGATPMDQVEEVIPVAHPSVEKIHITNHRGFIKDSIATWMVPALISGEQEEQKNCLELACQRKSYPMCNQTSWEPFGGGQLPSYGRLTLPLDPDIDLQLNISFTYGPVILNGDGMDYYESPLLDFGWLTIPPKNGTVLGLINKASRGGQFTVIPHVLTFAPRESSGNCYLPIQTSQIMDKDVLTESNLVVLPTQNFRYVIATYDISRDDHAIVYYVYDPIRTISYTHPFRLTTKGRPDFLRIECFVWGDDLWCHQFYRFEADITNSTTSVENLVRIRFSCNRSKH

SEQ ID NO: 71 - protein, 607 aa, Canine morbillivirus
MLSYQDKVGAFYKDNARANSSKLSLVTEEQGGRRPPFLLFVLLVLLVGIMALLAITGVRFHQVSTSNMEFSRLLKEDMEKSDAVHHQVIDVLTPLFKIIGDEIGLRLPQKLNEIKQFILQKTNFFNPNREFDFRDLHWCINPPSKIKVNFTNYCDTIGIRKSIASAANPILLSALSGGRGDIFPPYRCNGAATSVGRVFPLSVSLSMSLISRTSEIINMLTAISDGVYGKTYLLVPDYIEGEFDTQKIRVFEIGFIKRWLNNMPLLQTTNYMVLPENSKAKVCTIAVGELTLASLCVDESTVLLYHDSNGSQGGIIVVTLGIFGATPMDQVEEVIPVAHPSVEKIHITNHRGFIKDSIATWMVPALISGEQEEQKNCLESACQRKSYPMCNQTSWEPFGGGQLPSYGRLTLPLDPGIDLQLNISFTYGPVILNGDGMDYYESPLLDSGWLTIPPKNGTVLGLINKASRGDQFTVIPHVLTFSPRESRGNCYLPIQTSQIMDKDVLTESNLVVLPTQNFRYVIATYDISRDDHAIVYYVYDPIRTISYTHPFRLTIKGRPDFLRIECFVWDDDLWCHQFYRFEADITNSTTSVENLVHIRFSCNRSKP

SEQ ID NO: 72 - protein, 607 aa, Canine morbillivirus
MLSYQDKVSAFYKDNARANSSKLSLVTEEHGSRRPPYLLFILLILLVGIMALLAITGARFHQVSTSNMEFSRLLKEDMEKSEAVHHQVIDVLTPLFKIIGDEIGLRLPQKLNEIKQFILQKTNFFNPKREFDFRDLHWCINPPSKIKVNFTNYCDTIGIRKSIALAANPILLSALSRGRGDIFPPYRCSGAATSVGRVFPLSVSLSMSLISRTSEIINMLTAISDGVYGKTYLLVPDYIEGEFDTQKIRVFEIGFIKRWLNDMPLLQTTNYMVLPENSKAKVCTIAVGELTLASLCVDESTVLLYHDSNGSQDGILVVTLGIFGATPMDQVEEVIPVAHPSVEKIHITNHRGFIKDSIATWMVPVLVSENQEEQKNCLESACQRKSYPMCNQTSWEPFGGGQLPSYGRLTLPLDPGIDLQLNLSFTYGPIILNGDGMDYYESPLLNSGWLTIPPKNGTILGLINKASRGDQFTVTPHVLTFAPRESSGNCYLPIQTSQIMDKDVLTESNLVVLPTQNFRYVIATYDISRDDHAIVYYVYDPIRTISYTYPFRLTTKGRPDFLRIECFVWDYDLWCHQFYRFEADITNSTTSVENLVRIRFSCNRSKP

SEQ ID NO: 73 - protein, 607 aa, Canine morbillivirus
MLSYQDKVGAFYKDNARANSSKLSLVTEEQGGRRPPYLLFVLLILLVGIMTLLAITGVRFHQVSTSNMEFSRLLKEDMEKSEAVHHQVMDVLTPLFKIIGDEVGLRLPQKLNEIKQFILQKTNFFNPNREFDFRDLHWCINPPSKIKVNFSNYCDTIGIRKSIASAANPILLSALSGGRGDIFPPYRCNGAATSIGRVFPLSVSLSMSLISRTAEIINMLTAISDGVDGKTYLLVPDYIEGEFETQKIRVFEIGFIKRWLNDMSLLQTTNYMVLPENSKAKVCTIAVGELTLASLCVDESTVLLYHDSNGSQDGILVVTLGIFWGTPMDQVEEVIPVAHPSVEKIHITNHRGFIKDSKAIWMVPALVSEKQEEQKNCLESACQRKTYPMCNQTSWEPFGGGQLPSYGRLTLPLDPSIDLQLNISFTYGPVILNGDGMDYYESPLLDSGWLTIPPKNGTVLGLMNKASRGDQFTVIPHVLTFAPRESGGNCYLPIQTSQIMDKDVLAESNLVVLPTQNFRYVIATYDISRDDHAIVYYVYDPIRTISYTYPFRLTTKGRPDFLRIECFVWDDDLWCHQFYRFEADITNSTTSVENLVRIRFSCNRSKP

SEQ ID NO: 74 - protein, 607 aa, Canine morbillivirus
MLSYQDKVGAFYKDNARANSSKLSLVTEEHGSRRPPYLLFILLILLVGIMALLAITGARFHQVSTSNMEFSRLLKEDMEKSEAVHHQVIDVLTPLFKIIGDEIGLRLPQKLNEIKQFILQKTNFFNPKREFDFRDLHWCINPPSKIKVNFTNYCDTIGIRKSIALAANPILLSALSRGRGDIFPPYRCSGAATSVGRVFPLSVSLSMSLISRTSEIINMLTAISDGVYGKTYLLVPDYIEGEFDTQKIRVFEIGFIKRWLNDMPLLQTTNYMVLPENSKAKVCTIAVGELTLASLCVDESTVLLYHDSNGSQDGILVVTLGIFGATPMDQVEEVIPVAHPSVEKIHITNHRGFIKDSIATWMVPVLVSENQEEQKNCLESACQRKSYPMCNQTSWEPFGGGQLPSYGRLTLPLDPGIDLQLNISFTYGPIILNGDGMDYYESPLLNSGWLTIPPKNGTILGLINKASRGDQFTVTPHVLTFAPRESSGNCYLPIQTSQIMDKDVLTESNLVVLPTQNFRYVIATYDISRDDHAIVYYVYDPIRTISYTYPFRLTTKGRPDFLRIECFVWDYDLWCHQFYRFEADITNSTTSVENLVRIRFSCNRSKP

SEQ ID NO: 75 - protein, 607 aa, Canine morbillivirus
MLSYQDKVGAFYKDNARANSSKLSLVTEEQGGRRPPFLLFVLLVLLVGIMALLAITGVRFHQVSTSNMEFSRLLKEDMEKSDAVHYQVRDVLTPLFKIIGDEIGLRLPQKLNEIKQFILQKTNFFNPNREFDFRDLHWCINPPSKIKVNFTNYCDTIGIRKSIASAANPILLSALSGGRGDIFPPYRCNGAATSVGRVFPLSVSLSMSLISRTSEIINMLTAISDGVYGKTYLLVPDYIEGEFDTQKIRVFEIGFIKRWLNNMPLLQTTNYMVLPENSKAKVCTIAVGELTLASLCVDESTVLLYHDSNGSQGGIIVVTLGIFGATPMDQVEEVIPVAHPSVEKIHITNHRGFIKDSIATWMVPALISGEQEEQKNCLESACQRKSYPMCNQTSWEPFGGGQLPSYGRLTLPLDPGIDLQLNISFTYGPVILNGDGMDYYESPLLDSGWLTIPPKNGTVLGLINKASRGDQFTVIPHVLTFSPRESRGNCYLPIQTSQIMDKDVLTESNLVVLPTQNFRYVIATYDISRDDHAIVYYVYDPIRTISYTHPFRLTIKGRPDFLRIECFVWDDDLWCHQFYRFEADITNSTTSVENLVHIRFSCNRSKP

SEQ ID NO: 76 - protein, 607 aa, Canine morbillivirus
MLSYQDKVGAFYKDNARANSSKLSLVTEEQGGRRPPYLLFVLLILLVGIMTLLAITGVRFHQVSTSNMEFSRLLKEDMEKSEAVHHQVIDVLTPLFKIIGDEVGLQLPQKLNEIKQFILQKTNFFNPNREFDFRDLHWCINPPSKIKVNFTNYCDTIGIKKSIASAANPILLSALSGGRGDIFPPYRCSGATTSVGRVFPLSVSLSMSLISKTSEITSMLTAISDGVYGKTYLLVPDYIEGEFDTQKIRVFEIGFIKRWLNNMPLLQTTNYMVLPENSKAKVCTIAVGELTLASLCVDESTVLLYHDSNGSQDGILVVTLGIFGATPMDQVEEVIPVAHPSVEKIHITNHRGFIKDSIATWMVPALVSEKQEEQKNCLESACQRKTYPMCNQTSWEPFGGGQLPSYGRLTLPLDPSIDLQLNISFTYGPVILNGDGMDYYESPLSDSGWLTIPPRNGTVLGLINKASRGDQFTVIPHVLTFAPRESSGNCYLPIQTSQIMDKDVLTESNLVVLPTQNFRYVIATYDISRGDHAIVYYVYDPIRTISYTHPFRLTTKGRPDFLRIECFVWDDDLWCHQFYRFEADITNSTTSVENLVRIRFSCNRSKP

SEQ ID NO: 77 - protein, 607 aa, Canine morbillivirus
MLSYQDKVGAFYKDNARANSSKLSLVTEEQGGRRPPYLLFVLLILLVGIMTLLAITGVRFHQVSTSNMEFSRLLKEDMEKSEAVHHQVIDVLTPLFKIIGDEVGLRLPQKLNEIKQFILQKTNFFNPNREFDFRDLHWCINPPSKIKVNFTNYCDTIGIKKSIASAANPILLSALSGGRGDIFPPYRCSGATTSVGRVFPLSVSLSMSLISKTSEITSMLTAISDGVYGKTYLLVPDYIEGEFDTQKIRVFEIGFIKRWLNNMPLLQTTNYMVLPENSKAKVCTIAVGELTLASLCVDESTVLLYHDSNGSQDGILVVTLGIFGATPMDQVEEVIPVAHPSVEKIHITNHRGFIKDSIATWMVPALVSEKQEEQKNCLESACQRKTYPMCNQTSWEPFGGGQLPSYGRLTLPLDPSIDLQLNISFTYGPVILNGDGMDYYESPLSDSGWLTIPPRNGTVLGLINKASRGDQFTVIPHVLTFAPRESSGNCYLPIQTSQIMDKDVLTESNLVVLPTQNFRYVIATYDISRGDHAIVYYVYDPIRTISYTYPFRLTTKGRPDFLRIECFVWDDDLWCHQFYRFEADITNSTTSVENLVRIRFSCNRSKP

SEQ ID NO: 78 - protein, 607 aa, Canine morbillivirus
MLSYQDKVGAFYKDNARANSSKLSLVTEEQGGRRPPYLLFVLLILLVGIMTLLAITGVRFHQVSTSNMEFSRLLKEDMEKSEAVHHQVIDVLTPLFKIIGDEVGLRLPQKLNEIKQFILQKTNFFNPNREFDFRDLHWCINPPSKIKVNFTNYCDTIGIRKSIASAANPILLSALSGGRGDIFPPYRCSGATTSVGRVFPLSVSLSMSLISKTSGITNMLTAISDGVYGKTYLLVPDYIEGEFDTQKIRVFEIGFIKRWLNNMPLFQTTNYMVLPENSKAKVCTIAVGELTLASLCVDESTVLLYHDSNGPQGGVLVVTLGIFGATPMDQVEEMIPVAHPSVEKIHITNHRGFIKDSIATWMVPVLVSEKQEEQKNCLESACQRKTYPMCNQTSWEPFGGGQLPSYGRLTLPLDPSIDLQLNISFTYGPVILNGDGMDYYESPLLDSGWLTIPPKNGTVLGLINKASRGDQFTVIPHVLTFAPRESSGNCYLPIQTSQIMDKDVLTESNLVVLPTQNFRYVIATYDISRGDHAIVYYVYDPIRTISYTYPFRLTTKGRPEFLRIECFVWDDDLWCHQFYRFEADITNSTISVENLVHIRFSCNRSKP

SEQ ID NO: 79 - protein, 607 aa, Canine morbillivirus
MLSYQDKVGAFYKDNARANSSKLSLVTEEQGGRRPPYLLFVLLILLVGIMTLLAITGVRFHQVSTSNMEFSRLLKEDMEKSEAVHHQVIDVLTPLFKIIGDEVGLRLPQKLNEIKQFILQKTNFFNPNREFDFRDLHWCINPPSKIKVNFTNYCDTIGIRKSIASAANPILLSALSGGRGDIFPPYRCSGATTSVGRVFPLSVSLSMSLISKTSGITNMLTAISDGVYGKTYLLVPDYIEGEFDTQKIRVFEIGFIKRWLNNMPLFQTTNYMVLPENSKAKVCTIAVGELTLASLCVDESTVLLYHDSNGSQGGVLVVTLGIFGATPMDQVEEMIPVAHPSVEKIHITNHRGFIKDSIATWMVPALVSEKQEEQKNCLESACQRKTYPMCNQTSWEPFGGGQLPSYGRLTLPLDPSIDLQLNVSFTYGPVILNGDGMDYYESPLLDSGWLTIPPKNGTVLGLINKASRGDQFTVIPHVLTFAPRESSGNCYLPIQTSQILDKDVLTESNLVVLPTQNFRYVIATYDISRGDHAIVYYVYDPIRTISYTHPFRLTTKGRPEFLRIECFVWDDDLWCHQFYQFEADITNSTISVENLVHIRFSCNRSKP

SEQ ID NO: 80 - protein, 607 aa, Canine morbillivirus
MLSYQDKVGAFYKDNARANSSKLSLVTEEQGGRRPLYLLFVLLILLVGIMTLLAITGVRFHHVSTSNMEFSRLLKEDMEKSEAVHHQVIDVLTPLFKIIGDEVGLRLPQKLNEIKQFILQKTNFFNPNREFDFRDLHWCINPPSKIKVNFTNYCDTIGIRKSIASAANPILLSALSGGRGDIFPSYRCSGATTSVGRVFPLSVSLSMSLISKTSKITNMLTAISDGVYGKTYLLVPDYIEGEVDTQKIRVFEIGFIKRWLNNMPLLQTTNYMVLPENSKAKVCTIAVGELTLASLCVDESTVLLYHDSNDSQDGILVVTLGIFGATLMDQVEKVIPVAHPSVEKIHITNHRGFIKNSIATWMVPALVSEKQEEQKNCLESACQRKTYPMCNQTSWEPFGGGQLPSYGRLTLPLDPSMDLQLNISFTYGPVILNGDGMDYYESPLPDSGWLTIPPKNGTVLGLINKASRGDQFTVIPHVLTFAPRESSGNCYLPIQTSQIMDKDVLTESNLVVLPTQNFRYIIATYDISRGDHAIVYYVYDPIRTISYTYPFRLTTKGRPDFLRIECFVWDDDLWCHQFYRFEADVTNSTTSVENLVRIKFSCDRSKP

SEQ ID NO: 81 - protein, 607 aa, Canine morbillivirus
MLSYQDKVGAFYKDNARANSSKLSLVTEEQGGRRPPYLLFVLLILLVGIMTLLAITGVRFHQVSTSNMEFSRLLKEDMEKSEAVHHQVIDVLTPLFKIIGDEVGLRLPQKLNEIKQFILQKTNFFNPNREFDFRDLHWCINPPSKIKVNFTNYCDTIGIRKSIASAANPILLSALSGGRGDIFPPYRCSGATTSMGRVFPLSVSLSMSLISKTSGITNMLTAISDGVYGKTYLLVPDYIEGEFDTQKIRVFEIGFIKRWLNNMPLFQTTNYMILPENSKAKVCTIAVGELTLASLCVDESTVLLYHDSNGSQGGVLVVTLGIFGATPMDQVEEMIPVAHPSVEKIHITNHRGFIKDSIATWMVPALVSEKQEEQKNCLESACQRKTYPMCNQTSWEPFGGGQLPSYGRLTLPLDPSIDLQLNVSFTYGPVILNGDGMDYYESPLLDSGWLTIPPKNGTVLGLINKASRGDQFTVIPHVLTFAPRESSGNCYLPIQTSQIMDKDVLTESNLVVLPTQNFRYVIATYDISRGDHAIVYYVYDPIRTISYTHPFRLTTKGRPEFLRIECFVWDDDLWCHQFYRFEADITNSTISVENLVHIRFSCNRSKP

SEQ ID NO: 82 - protein, 607 aa, Canine morbillivirus; identical to SEQ ID NO: 77

SEQ ID NO: 83 - protein, 607 aa, Canine morbillivirus
MLSYQDKVGAFYKDNARANSSKLSLVTEEQGGRRPPYLLFVLLILLVGIMTLLAITGVRFHQVSTSNMEFSRLLKEDMEKSEAVHHQVIDVLTPLFKIIGDEVGLRLPQKLNEIKQFILQKTNFFNPNREFDFRDLHWCINPPSKIKVNFTNYCDTIGIRKSIASAANPILLSALSGGRGDIFPPYRCSGATTSVGRVFPLSVSLSMSLISRTSEIINVLTAISDGVYGKTYLLVPDYIEGEFDTQKIRVFEIGFIKRWLNNMPLLQTTNYMVLPENSKAKVCTIAVGELMLASLCVDESTVSLYHDSNGSQDGILVVTLGIFGATPMDQVEEVIPVAHPSVEKIHITNHRGFIKDSIATWMVPALVFEKQEEQKNCLESACQRKTYPMCNQTSWEPFGGGQLPSYGRLTLPLDPSIDLQLNISFTYGPVILNGDGMDYYESTLSDSGWLTIPPKNGTILGLINKASRGDQFTVIPHVLTFAPRESSGNCYLPIQTSQIMDKDVLTESNLVVLPTQNFRYVIATYDISRGDHAIVYYVYDPIRTISYTYPFRLTTKGRPDFLRIECFVWDDDLWCHQFYRFEADITNSTTSVENLVRIRFSCNRSKP

SEQ ID NO: 84 - protein, 607 aa, Canine morbillivirus
MLSYQDKVGAFYKDNARANSSKLSLVTEEQGGRRPPYLLFVLLILLVGIMTLLAITGVRFHQVSTSNMEFSRLLKEDMEKSEAVHHQVIDVLTPLFKIIGDEVGLRLPQKLNEIKQFILQKTNFFNPNREFDFRDLHWCINPPSKIKVNFTNYCDTIEIRKSIASAANPILLSALSGGRGDIFPPYRCSGATTSVGRVFPLSVSLSMSLISRTSEITNMLTAISDGVYGKTYLLVPDYFEGEFDTQKIRVFEIGFIKRWLNDMPLLQTTNYMFLPENSKAKVCTIAVGELTLASLCVDESTVSLYHDGSGSQDGILVVTLGIFGATPMDQVEEVIPVAHPSVEKIHITNHRGFIKDSIATWMVPALVSEKQEEQKNCLESACQRKTYPMCNQTSWEPFGGGQLPSYGRWTLPLDPSIDLQLNISVTYGPVILNGDGMDYYESPLSDSGWLTIPPKNGTILGLINKASRGDQFTVIPHVLTFAPRESSGNCYLPIQTSQIMDKDVLTESNLVVLPTQNFRYVIATYDISRGDHAIVYYVYDPIRTISYTYPFRLTTKGRPVSLRIECFVWDDDLWCHQFYQFEADITNSTTSVENLVRIRFSCNRSKP

SEQ ID NO: 85 - protein, 607 aa, Canine morbillivirus
MLSYQDKVGAFYKDNARANSSKLSLVTEEQGGRRPPYLLFVLLILLVGIMTLLAITGVRFHQVSTSNMEFSRLLKEDMEKSEAVHHQVIDVLTPLFKIIGDEVGLRLPQKLNEIKQFILQKTNFFNPNREFDFRDLHWCINPPSKVKVNFTNYCDTIGIRKSIASAANPILLSALSGGRGDIFPPYRCSGATTSVGRVFPLSVSLSMSLISRTSEITNMLTAISDGVYGKTYLLVPDYIEGEFDTQKIRVFEIGFIKRWLNNMPLLQTTNYMVLPENSKAKVCTIAVGELTLASLCVDESTILLYHDSNGSQDGILVVTLGIFGATPMDQVEEVVPVAHPSVEKIHITNHRGFIKDSIATWMVPALVSEKQEEQKNCLESACQRKTYPMCNQTSWEPFGGGQLPSYGRLTLPLDPNIDLQLNISFTYGPVILNGDGMDYYESPLSDSGWLTIPPKNGTILGLINKASRGDQFTVIPHVLTFAPRESSGNCYLPIQTSQIMDKDVLTESNLVVLPTQNFRYVISTYDISRGDHAIVYYVYDPIRTISYTYPFRLTTKGRPDFLRIECFVWDDDLWCHQFYQFEADITNSTTSVENLVRIRFSCNRSKP

SEQ ID NO: 86 - protein, 607 aa, Canine morbillivirus
MLSYQDKVGAFYKDNARANSSKLSLVTEEQGGRRPPYLLFVLLILLVGIMTLLAITGVRFHQVSTSNMEFSRLLKEDMEKSEAVHHQVIDVLTPLFKIIGDEVGLRLPQKLNEIKQFILQKTNFFNPNREFDFRDLHWCINPPSKVKVNFTNYCDTIGIRKSIASAANPILLSALSGGRGDIFPPYRCSGVTTSVGRVFPLSVSLSMSLISRTSEITNMLTAISDGVYGKTYLLVPDYIEGEFDTQKIRVFEIGFIKRWLNNMPLLQTTNYMVLPENSKAKVCTIAVGELTLASLCVDESTILLYHDSNGSQDGILVVTLGIFGATPMDQVEEVVPVAHPSVEKIHITNHRGFIKDSIATWMVPALVSEKQEEQKNCLESACQRKTYPMCNQTSWEPFGGGQLPSYGRLTLPLDPNIDLQLNISFTYGPVILNGDGMDYYESPLSDSGWLTIPPKNGTILGLINKASRGDQFTVIPHVLTFAPRESSGNCYLPIQTSQIMDKDVLTESNLVVLPTQNFRYVISTYDISRGDHAIVYYVYDPIRTISYTYPFRLTTKGRPDFLRIECFVWDDDLWCHQFYQFEADITNSTTSVENLVRIRFSCNRSKP

SEQ ID NO: 87 - protein, 607 aa, Canine morbillivirus
MLSYQDKVGAFYKDNARANSSKLSLVTEEQGGRRPPYLLFVLLILLVGIMTLLAITGVRFHQVSTSNMEFSRLLKEDMEKSEAVHHQVIDVLTPLFKIIGDEVGLRLPQKLNEIKQFILQKTNFFNPNREFDFRDLHWCINPPSKIKVNFTNYCDTIGIRKSIASAANPILLSALSGGRGDIFPPYRCSGATTSMGRVFPLSVSLSMSLISRTSEITNMLTAISDGVYGKTYLLVPEYIEGEFDTQKIRVFEIGFIKRWLNNMPLLQTTNYMVLPENSKAKVCTIAVGELTLASLCADESTVLLYHDSSGSQDGILVVTLGIFGATPMDQVEEVIPVAHPSVEKIHITNHRGFIKDSIATWMAPALASEKQEEQKNCLESACQRKTYPMCNQTSWETFGRGQLPSYGRLTLPLDPSIDLQLNISFTYGPVILNGDGMDYYESPLSDSGWLTIPPKNGTILGLINKASRGDQFTVIPHVLTFAPRESSGNCYLPIQTSQIMDNDVLTESNLVVLLTQNFRYVIATYDISRGDHAIVYYVYDPIRTISYTYPFRLTTKGRPDFLRIECFVWDDDLWCHQFYQFEADITNSTTSVENLVRIRFSCNRSKP

SEQ ID NO: 88 - protein, 607 aa, Canine morbillivirus; identical to SEQ ID NO: 83

SEQ ID NO: 89 - protein, 607 aa, Canine morbillivirus
MLSYQDKVGAFYKDNARANSSKLSLVTEEQGGRRPPYLLFVLLILLVGIMTLLAITGVRFHQVSTSNMEFSRLLKEDMEKSEAVHHQVIDVLTPLFKIIGDEVGLRLPQKLNEIKQFILQKTNFFNPNREFDFRDLHWCINPPSKVKVNFTNYCDTIGIRKSIASAANPILLSALSGGRGDIFPPYRCSGATTSVGRVFPLSVSLSMSLISRTSEITNMLTAISDGVYGKTYLLVPDYIEGEFDTQKIRVFEIGFIKRWLNNMPLLQTTNYMVLPENSKAKVCTIAVGELTLASLCVDESTILLYHDSNGSQDGILVVTLGIFGATPMDQVEEVVPVAHPSVEKIHITNHRGFIKDSIATWMVPALVSEKQEEQKNCLESACQRKTYPMCNQTSWEPFGGGQLPSYGRLTLPLDPNIDLQLNISFTYGPVILNGDGMDYYESPLSDSGWLTIPPKNGTILGLINKAGRGDQFTVIPHVLTFAPRESSGNCYLPIQTSQIMDKDVLTGSNLVVLPTQNFRYVISTYDISRGDHAIVYYVYDPIRTISYTYPFRLTTKGRPDFLRIECFVWDDDLWCHQFYQFEADIANSTTGVENLVRIRFSCNRSKP

SEQ ID NO: 90 - protein, 607 aa, Canine morbillivirus
MLSYQDKVGAFYKDNARANSSRLSLVTEEQGGRRPPYLLFILLILLVGIMALLAITGVRFHQVSTSNMEFSRLLKEDMEKSEAVHHQVIDVLTPLFKIIGDEVGLRLPQKLNEIKQFILQKTNFFNPSREFDFRDLHWCINPPSKIKVNFTNYCDTIGIRKSIASAANPILLSALSGGRGDIFPPYRCSGATTSVGRVFPLSVSLSMSLISRASEIINMLTAISDGVYGKTYLLVPDYIEGEFDTQKIRVFEIGFIKRWLSDMPLLQTTNYMVLPENSKARVCTIAVGELTLASLCVDESTVLLYHDSNGSQDSVLVVTLGIFGATPMDQVEEVIPIAHPSVEKVHITNHRGLIKDSIATWMVPALVSEKQEEQKNCLESACQRKSYPMCNQTSWEPFGGGQLPSYGRLTLPLDPSIDLQLNISFTHGPVILNGDGMDYYESSLSDSGWLTIPSKNGTVLGLINKASRGDQFTVIPHVLTFAPRESSRNCYLPIQTSQIMDKDVLIESNLVVLPTQNFRYVTATYDISRNDHAIVYYVYDPIRSISYTYPFRLTTKGRPDFLRIECFVWDDDLWCHQFYRFKADITNSTTSVENLVRIRFSCNRSKP

SEQ ID NO: 91 - protein, 607 aa, Canine morbillivirus
MLSYQDKVGAFYKDNARANSSRLSLVTEEQGGRRPPYLLFILLILLVGIMALLAITGVRFHQVSTSNMEFSRLLKEDMEKSEAVHHQVIDVLTPLFKIIGDEVGLRLPQKLNEIKQFILQKTNFFNPSREFDFRDLHWCINPPSKIKVNFTNYCDTIGIRKSIASAANPILLSALSGGRGDIFPPYRCSGATTSVGRVFPLSVSLSMSLISRASEIINMLTAISDGVYGKTYLLVPDYIEGEFDTQKIRVFEIGFIKRWLSDMPLLQTTNYMVLPENSKARVCTIAVGELTLASLCVDESTVLLYHDSNGSQDSVLVVTLGIFGATPMDQVEEVIPIAHPSVEKVHITNHRGLIKDSIATWMVPALVSEKQEEQKNCLESACQRKSYPMCNQTSWEPFGGEQLPSYGRLTLPLDPSIDLQLNISFTHGPVILNGDGMDYYESSLSDSGWLTIPPKNGTVLGLINKASRGDQFTVIPHVLTFAPRESSRNCYLPIQTSQIMDKDVLIESNLVVLPTQNFRYVTATYDISRNDHAIVYYVYDPIRSISYTYPFRLTTKGRPDFLRIECFVWDDDLWCHQFYRFKADITNSTTSVENLVRIRFSCNRSKP

SEQ ID NO: 92 - protein, 607 aa, Canine morbillivirus
MLSYQDKVGAFYKDNARANSSRLSLVTEEQGGRRPPYLLFILLILLVGIMALLAITGVRFHQVSTSNMEFSRLLKEDMEKSEAVHHQVIDVLTPLFKIIGDEVGLRLPQKLNEIKQFILQKTNFFNPSREFDFRDLHWCINPPSKIKVNFTNYCDTIGIRKSIASAANPILLSALSGGRGDIFPPYRCSGATTSVGRVFPLSVSLSMSLISRASEIINMLTAISDGVYGKTYLLVPDYIEGEFDTQKIRVFEIGFIKRWLSDMPLLQTTNYMVLPENSKARVCTIAVGELTLASLCVDESTVLLYHDSNGSQDSVLVVTLGIFGATPMDQVEEVIPIAHPSVEKVHITNHRGLIKDSIATWMVPALVSEKQEEQKNCLESACQRKSYPMCNQTSWKPFGGEQLPSYGRLTLPLDPSIDLQLNISFTHGPVILNGDGMDYYESSLSDSGWLTIPPKNGTVLGLINKASRGDQFTVIPHVLTFAPRESSRNCYLPIQTSQIMDKDVLIESNLVVLPTQNFRYVTATYDISRNDHAIVYYVYDPIRSISYTYPFRLTTKGRPDFLRIECFVWDDDLWCHQFYRFKADITNSTTSVENLVRIRFSCNRSKP

SEQ ID NO: 93 - protein, 607 aa, Canine morbillivirus
MLSYQDKVGAFYKDNARANSSKLSLVTEEQGGRRPPYLLFILLILLVGIMALLAITGVRFHQVSTSNMEFSRLLKEDMEKSEAVHHQVIDVLTPLFKIIGDEIGLRLPQKLNEIKQFILQKTNFFNPSREFDFRDLHWCINPPSKIKVNFTNYCDTIGIRKSIASAANPILLSALSGGRGDIFPPYRCSGATTSVGRVFPLSVSLSMSLISRASEIINMLTAISDGVYGKTYLLVPDYIEGEFDTQKIRVFEIGFIKRWLSDMPLLQTTNYMVLPENSKARVCTIAVGELTLASLCVDESTVLLYHDSNGSQDSVLVVTLGIFGATPMDQVEEVIPIAHPSVEKIHITNHRGLIKDSIATWMVPALVSEKQEEQKNCLESACQRKSYPMCNQTSWEPFGGEQLPSYGRLTLPLDPSIDLQLNISFTHGPVILNGDGMDYYESSLSDSGWLTIPPKNGTVLGLINKASRGDQFTVIPHVLTFAPRESSRNCYLPIQTSQIMDKDVLIESNLVVLPTQNFRYVIATYDISRNDHAIVYYVYDPIRTISYTYPFRLTTKGRPDFLRIECFVWDDDLWCHQFYRFEADITNSTTSVENLVRIRFSCNRSKP

SEQ ID NO: 94 - protein, 607 aa, Canine morbillivirus
MLSYQDKVGAFYKDNARANSSKLSLVTEEQGVRRPPYLLFILLILLVGIMALLAITGVRFHQVSTSNMEFSRLLKEDMEKSEAVHHQVIDVLTPLFKIIGDEIGLRLPQKLNEIKQFILQKTNFFNPSREFDFRDLHWCINPPSKIKVNFTNYCDTIGIRKSIASAVNPILLSALSGGRGDIFPPYRCSGATTSVGRVFPLSVSLSMSLISRASEIINMLTAISDGVYGKTYLLVPDYIEGEFDTQKIRVFEIGFIKRWLSDMPLLQTTNYMVLPENSKAGVCTIAVGELTLASLCVDESTVLLYHDSNGSQDSVLVVTLGIFGATPMDQVEEVIPVAHPSVEKIHITNHRGLIKDSIATWMVPALVSEKQEEQKNCLESACQRKSYPMCNQTSWEPFGGGQLPSYGRLTLPLDPSIDLQLNISFTHGPVILNGDGMDYYESPLSDSGWLTIPPKNGTVLGLINKASRGDQFTVIPHVLTFAPRESSRNCYLPIQTSQIMDKDVLIESNLVVLPTQNFRYVIATYDISRNDHAIVYYVYDPIRTISYTYPFRLTTKGRPDFLRIECFVWDDDLWCHQFYRFEADITNSTTSVENLVRIRFSCNRSKP

SEQ ID NO: 95 - protein, 607 aa, Canine morbillivirus
MLSYQDKVGAFYKDNARANSSRLSLVTEEQGGRRPPYLLFILLILLVGIMALLAITGVRFHQVSTSNMEFSRLLKEDMEKSEAVHHQVIDVLTPLFKIIGDEVGLRLPQKLNEIKQFILQKTNFFNPSREFDFRDLHWCINPPSKIKVNFTNYCDTIGIRKSIASAANPILLSALSGGRGDIFPPYRCSGATTSVGRVFPLSVSLSMSLISRASEIINMLTAISDGVYGKTYLLVPDYIEGEFDTQKIRVFEIGFIKRWLSDMPLLQTTNYMVLPENSKARVCTIAVGELTLASLCVDESTVLLYHDSNGSQDSVLVVTLGIFGATPMDQVEEVIPIAHPSVEKVHITNHRGLIKDSIATWMVPALVSEKQEEQKNCLESACQRKSYPMCNQTSWEPFGGGQLPSYGRLTLPLDPSIDLQLNISFTHGPVILNGDGMDYYESSLSDSGWLTIPPKNGTVLGLINKASRGDQFTVIPHVLTFAPRESSRNCYLPIQTSQIMDKDVLIESNLVVLPTQNFRYVTATYDISRNDHAIVYYVYDPIRSISYTYPFRLTTKGRPDFLRIECFVWDDDLWCHQFYRFKADITNSTTSVENLVRIRFSCNRSKP

SEQ ID NO: 96 - protein, 607 aa, Canine morbillivirus
MLSYQDKVGAFYKDNARANSSKLSLVTEEQGIRRPPYLLFVLLILLVGVLALLAITGVRFHQVSTSNMEFSRLLKEDMEKSEAVHHQVIDVLTPLFKIIGDEIGLRLPQKLNEIKQFILQKTNFFNPSREFDFRDLHWCINPPSKIKVNFTSYCDTIGIKKSIASAAKPILLSALSGGRGDIFPPYRCSGATTSMGRVFPLSVSLSMSLISRTSEIINMLTAISDGVYGKTYLLVPDYIEGEFDTQKIRVFEIGFIKRWLNDMPLLQTTNYMVLPENSKAKVCTIAVGELTLASLCVDDSTVLLYHDSNGSQDGILVVTLGIFGATPMDQVEEVIPIAHPSVEKIHITNHRGFIKDSIATWMVPALVSERQEEQKICLESACQRKSYPMCNQTSWEPFGGGQLPSYGRLTLPLDASIDLQLNISFTYGPVILNGDGMDYYESPLLDSGWLTIPPKNGTILGLINKASRGDQFTVIPHVLTFSPRESSGSCYLPIQTSQIMDKDVLTESNLVVLPTQNFRYVVATYDISRNDHAIVYYVYDPIRTISYTYPFRLTTKGRPDFLRIECFVWDDDLWCHQFYRFETDITNSTTSVENLVRIRFSCNRSKP

SEQ ID NO: 97 - protein, 607 aa, Canine morbillivirus; identical to SEQ ID NO: 96

SEQ ID NO: 98 - protein, 607 aa, Canine morbillivirus
MLSYQDKVGAFYKDNARANSSKLSLVTEEQGIRRPPYLLFVLLILLVGVLALLAITGVRFHQVSTSNMEFSRLLKEDMEKSEAVHHQVIDVLTPLFKIIGDEIGLRLPQKLNEIKQFILQKTNFFNPSREFDFRDLHWCINPPSKIKVNFTSYCDTIGIKKSIASAAKPILLSALSGGRGDIFPPYRCSGATTSMGRVFPLSVSLSMSLISRTSEIINMLTAISDGVYGKTYLLVPDYIEGEFDTQKIRVFEIGFIKRWLNDMPLLQTTNYMVLPENSKAKVCTIAVGELTLASLCVDDSTVLLYHDSNGSQDGILVGTLGIFGATPMDQVEEVIPIAHPSVEKIHITNHRGFIKDSIATWMVPALVSERQEEQKICLESACQRKSYPMCNQTSWEPFGGGQLPSYGRLTLPLDASIDLQLNISFTYGPVILNGDGMDYYESPLLDSGWLTIPPKNGTILGLINKASRGDQFTVIPHVLTFSPRESSGSCYLPIQTSQIMDKDVLTESNLVVLPTQNFRYVVATYDISRNDHAIVYYVYDPIRTISYTYPFRLTTKGRPDFLRIECFVWDDDLWCHQFYRFETDITNSTTSVENLVRIRFSCNRSKP

SEQ ID NO: 99 - protein, 607 aa, Canine morbillivirus
MLSYQDKVGAFYKDNARANSSKLSLVTEEQGIRRPPYLLFVLLILLVGVLALLAITGVRFHQVSTSNMEFSRLLKEDMEKSEAVHHQVIDVLTPLFKIIGDEIGLRLPQKLNEIKQFILQKTNFFNPSREFDFRDLHWCINPPSKIKVNFTSYCDTIGIKKSIASAAKPILLSALSGGRRDIFPPYRCSGATTSMGRVFPLSVSLSMSLISRTSEIINMRTAISDGVYGKTYLLVPDYIEGEFDTQKIRVFEIGFIKRWLNDMPLLQTTNYMILPENSKAKVCTIAVGELTLASLCVDDSTVLLYHDSNGSQDGILVVTLGIFGATPMDQVEEVIPIAHPSVEKIHITNHRGFIKDSIATWMVPALVSERQEEQKICLESACQRKSYPMCNQTSWEPFGGGQLPSYGRLTLPLDASIDLQLNISFTYGPVILNGDGMDYYESPLLDSGWLTIPPKNGTILGLINKASRGDQFTVIPHVLTFSPRESSGSCYLPIQTSQIMDKDVLTESNLVVLPTQNFRYVVATYDISRNDHAIVYYVYDPIRTISYTYPFRLTTKGRPDFLRIECFVWDDDLWCHQFYRFETDITNSTTSVENLVRIRFSCNRSKP

SEQ ID NO: 100 - protein, 607 aa, Canine morbillivirus
MLSYQDKVGAFYKDNARANSSKLSLVTEEQGIRRPPYLLFVLLILLVGVLALLAITGVRFHQVSTSNMEFNRLLKEDMEKSEAVHHQVIDVLTPLFKIIGDEIGLRLPQKLNEIKQFILQKTNFFNPSREFDFRDLHWCINPPSKIKVNFTSYCDTIGIKKSIASAAKPILLSALSGGRGDIFPPYRCSGATTSMGRVFPLSVSLSMSLISRTSEIINMLTAISDGVYGKTYLLVPDYIEGEFDTQKIRVFEIGFIKRWLNDMPLLQTTNYMVLPENSKAKVCTIAVGELTLASLCVDDSTVLLYHDSSGSQDGILVVTLGIFGATPMDQVEEVIPIAHPSVEKIHITNHRGFIKDSIATWMVPALVSERQEEQKICLESACQRKSYPMCNQTSWEPFGGGQLPSYGRLTLPLDSSIDLQLNISFTYGPVILNGDGMDYYESPLLDSGWLTIPPKNGTILGLINKASRGDQFTVIPHVLTFSPRESSGSCYLPIQTSQIMDKDVLTESNLVVLPTQNFRYVVATYDISRNDHAIVYYVYDPIRTISYTYPFRLTTKGRPDFLRIECFVWDDDLWCHQFYRFETDITNSTTSVENLVRIRFSCNRSKP

SEQ ID NO: 101 - protein, 607 aa, Canine morbillivirus
MLSYQDKVGAFYKDNARANSSKLSLVTEEQGIRRPPYLLFVLLILLVGVLALLAITGVRFHQVSTSNMEFSRLLKEDMEKSEAVHHQVIDVLTPLFKIIGDEIGLRLPQKLNEIKQFILQKTNFFNPSREFDFRDLHWCINPPSKIKVNFTSYCDTIGIKKSIASAAKPILFLALSGGRGDIFPPYRCSGATTSMGRVFPLSVSLSMSLISRTSEIINMLTAISDGVYGKTYLLVPDYIEGEFDTQKIRVFEIGFIKRWLNDMPLLQTTNYMVLPENSKAKVCTIAVGELTLASLCVDDSTVLLYHDSNGSQDGILVVTLGIFGATPMDQVEEVIPIAHPSVEKIHITNHRGFIKDSIATWMVPALVSERQEEQKICLESACQRKSYPMCNQTSWEPFGGGQLPSYGRLTLPLDASIDLQLNISFTYGPVILNGDGMDYYESPLLDSGWLTIPPKNGTILGLINKASRGDQFTVIPHVLTFSPRESSGSCYLPIQTSQIMDKDVLTESNLVVLPTQNFRYVVATYDISRNDHAIVYYVYDPIRTISYTYPFRLTTKGRTDFLRIECFVWDDDLWCHQFYRFEADITNSTTSVENLVRIRFSCNRSRP

SEQ ID NO: 102 - protein, 607 aa, Canine morbillivirus
MLSYQDKVGAFYKDNARANSSKLSLVTEEQGIRRPPYLLFVLLILLVGVLALLAITGVRFHQVSTSNMEFSRLLKEDMEKSEAVHHQVIDVLTPLFKIIGDEIGLRLPQKLNEIKQFILQKTNFFNPSREFDFRDLHWCINPPSKIKVNFTSYCDTIGIRKSIALAAKPILLSALSGGKGDIFPPYRCSGATTSIGRVFPLSVSLSMSLISRTSEIINMLTAVSDGVYGKTYLLVPDYIEGEFDTQKIRVFEIGFIKRWLNDMPLLQTTNYMVLPENSKAKVCTIAVGELTLASLCVGESTVLLYHDSNGSQDGILVVTLGIFGATPMDQVEEVIPVAHPSVEKIHITNHRGFIKDSIATWMVPALVSERQEEQKICLESACQRKSYPMCNQTSWEPFGGGQLPSYGRLTLPLDASIDLQLNISFTYGPVILNGDGMDYYESPLLDSGWLTIPPKNGTVLGLINKASRGDQFTVIPHVLTFAPRESSGSCYLPIQTSQIMDKDVLTESNLVVLPTQNFRYVVATYDISRNDHAIVYYVYDPIRTISYTYPFRLTTKGKPDFLRIECFVWDDDLWCHQFYRFEADITNSTTSVENLVRIRFSCNRSKP

SEQ ID NO: 103 - protein, 607 aa, Canine morbillivirus
MLSYQDKVGAFYKDNARANSSKLSLVTEEQGIRRPPYLLFVLLILLVGVLALLAITGVRFHQVSTSNMEFSRLLKEDMEKSEAVHHQVIDVLTPLFKIIGDEIGLRLPQKLNEIKQFILQKTKFFNPSREFDFRDLHWCVNPPSKIKVNFTSYCDTIGIRKSIASAAKPILSSALSGGRGDIFPPYRCSGATTSIGRVFPLSVSLSMSLISRTSEIINMLTAISDGVYGKTYLLVPDYIEGEFDTQKIRVFEIGFIKRWLNDMPLLQTTNYMVLPENSKAKVCTIAVGELTLASLCVDESTVLLYHDSNGSQDGILVVTLGIFGATPMDQVEEVIPVAHPSVEKIHITNHRGFIKDSIATWMVPALVSERQEEQKICLESACQRKSYPMCNQTSWEPFGGGQLPSYGRLTLPLDASIDLQLNISFTYGPVILNGDGMDYYESPFLDPGWLTIPPKNGTILGLINKASRGDQFTVIPHVLTFAPRESSGSCYLPIQTSQVMDKDVLTESNLVVLPTQSFIYVVATYDISRNDHAIVYYIYDPIRTISYTHPFRLTTKGRPDFLRIECFVWDDDLWCHQFYRFETDITNSTTSVENLVRIRFSCNRSKP

SEQ ID NO: 104 - protein, 607 aa, Canine morbillivirus
MLSHQDKVGAFYKDNARANSSKLSLMTEERGDRRPPYLLFVLLILLVGILALLAITGVRFHQVSTSNMEFSRLLKEDMEKSEAVHHQVIDVLTPLFKIIGDEIGLRLPQKLNEIKQFILQKTNFFNPNREFDFRDLHWCINPPSKIKVNFTNYCDTIGIRKSIASAANPILLSALSGDRGDIFPPYRCSGATTSVGRVFPLSVSLSMSLISRTAEIINMLTAISDGVYGKTYLLVPDYIEGEFDTQKIRVFEIGFIKRWLNNMPLLQTTNYMVLPENSKAKVCTIAVGELTLASLCVDESTVLLSHDSNGSQDGILVVTLGIFGATLMDQVEEVIPVAHPSVEKIHITNHRGFIKDSIATWMVPALASEKQEEQQNCLESACQRKSYPMCNQTSWEPFGGRQLPSYGRLTLPIDPSIDLQLNISFTYGPVILNGDGMDYYDSPLLDSGWLTIPPKNGTVLGLINKASRGDQFTVIPHVLTFAPRESSGKCYLPIQTSQIMDKDVLTESNLVVLPTQNFRYVIATYGVSRDDHAIVYYVYDPIRAISYTYPFRLTTKGRPDFLRIECFVWDDDLWCHQFYRFEADVTNSTTSVENLVCIRFSCNRSKP

SEQ ID NO: 105 - protein, 607 aa, Canine morbillivirus
MLSYQDKVGAFYKDNARANSSKLSLMTEEQGDRRPPYLLFVLLILLVGILALLAITGVRFHQVSTSNMEFSRLLKEDMEKSEAVHHQVIDVLTPLFKIIGDEIGLRLPQKLNEIKQFILQKTNFFNPNREFDFRDLHWCINPPSKIKVNFTNYCDTIGIKKSIASAANPILLSALSGGRGDIFPPYRCSGATTSVGRVFPLSVSLSMSLISKTAEIINMLTAISDGVYGKTYLLVPDYIEGEFDTQEIRVFEIGFIKRWLNNMPLLQTTNYMILPENSKAKVCTIAVGELTLASLCVDESTVLLSHDSNGSQDGILVVTLGIFGATLVDQVEEVIPVAHPSVEKIHITNHRGFIKDSIATWMVRALASEKQEEQQNCLESACQRRSYPMCNQTSWEPFGGRQLPSYGRLALPIDPSIHLQLNISFTYGPVILNGDGMDYYDSPLLDSGWLTIPPKNGTVLGLINKASRGDQFTVIPHVLTFAPRESSGNCYLPIQTSQIMDKDVLTESNLVVLPTQNFRYVIATYDVSRDDHAIVYYVYDPIRTISYTYPFRLTTKGRPDFLRIECFVWDDDLWCHQFYRFEADVTNSTTSVENLVCIRFSCNRSKP

SEQ ID NO: 106 - protein, 607 aa, Canine morbillivirus
MLSHQDKVGAFYKDNARANSSKLSLMTEERGDRRPPYLLFVLLILLVGILALLAITGVRFHQVSTSNMEFSRLLKEDMEKSEAVHHQVIDVLTPLFKIIGDEIGLRLPQKLNEIKQFILQKTNFFNPNREFDFRDLHWCINPPSKIKVNFTNYCDTIGIRKSIASAANPILLSALSGDRGDIFPPYRCSGATTSVGRVFPLSVSLSMSLISRTAEIINMLTAISDGVYGKTYLLVPDYIEGEFDTQKIRVFEIGFIKRWLNNMPLLQTTNYMVLPENSKAKVCTIAVGELTLASLCVDKSTVLLSHDSNGSQDGILVVTLGIFGATLMDQVEEVIPVAHPSVEKIHITNHRGFIKDSIATWMVPALASEKQEEQQNCLESACQRKSYPMCNQTSWEPFGGRQLPSYGRLTLPIDPSIDLQLNISFTYGPVILNGDGMDYYDSPLLDSGWLTIPPKNGTVLGLINKASRGDQFTVIPHVLTFAPRESSGNCYLPIQTSQIMDKDVLTESNLVVLPTQNFRYVIATYDVSRDDHAIVYYVYDPIRTISYTHPFRLTTKGRPDFLRIECFVWDDDLWCHQFYRFEADVTNSTTSVENLVCIRFSCNRSKP

SEQ ID NO: 107 - protein, 607 aa, Canine morbillivirus
MLSHQDKVGAFYKDNARANSSKLSLMTEERGDRRPPYLLFVLLILLVGILALLAITGVRFHQVSTSNMEFSRLLKEDMEKSEAVHHQVIDVLTPLFKIIGDEIGLRLPQKLNEIKQFILQKTNFFNPNREFDFRDLHWCINPPSKIKVNFTNYCDTIGIKKSIASAANPILLSALSGGRGDIFPPYRCSGATTSVGRVFPLSVSLSMSLISRTAEIINMLTAISDGVYGKTYLLVPDYIEGEFDTQKIRVFEIGFIKRWLNNMPLLQTTNYMVLPENSKAKVCTIAVGELTLASLCVDESTVLLSHDSNGSQDGILVVTLGIFGATLMDQVEEVIPVAHPSVEKIHITNHRGFIKDSIATWMVPALASEKQEEQQNCLESACQRKSYPMCNQTSWEPFGGRQLPSYGRLTLPIDPSIDLQLNISFTYGPVILNGDGMDYYDSPLLDSGWLTIPPKNGTVLGLINKASRGDQFTVIPHVLTFAPRESSGNCYLPIQTSQIMDKDVLTESNLVVLPTQNFIYVIATYDVSRDDHAIVYYVYDPIRTISYTHPFRLTTKGRPDFLRIECFVWDDDLWCHQFYRFEADVTNSTTSVENLVCIRFSCNRSKP

SEQ ID NO: 108 - protein, 607 aa, Canine morbillivirus
MLSHQDKVGAFYKDNARANSSKLSLMTEERGDRRPPYLLFVLLILLVGILALLAITGVRFHQVSTSNMEFSRLLKEDMEKSEAVHHQVIDVLTPLFKIIGDEIGLRLPQKLNEIKQFILQKTNFFNPNREFDFRDLYWCINPPSKIKVNFTNYCDTIGIKKSIASAANPILLSALSGGRGDIFPPYRCSGATTSVGRVFPLSVSLSMSLISRTAEIINMLTAISDGVYGKTYLLVPDYIEGEFDTQKIRVFEIGFIKRWLNNMPLLQTTNYMVLPENSKAKACTIAVGELTLASLCVDESTVLLSHDSNGSQDGILVVTLGIFGATLMDQVEEVIPVAHPSVEKIHITNHRGFIKDSIATWMVPALASEKQEEQQNCLESACQRKSYPMCNQTSWEPFGGRQLPSYGRLTLPIDPSIDLQLNISFTHGPVILNGDGMDYYDSPLLDSGWLTIPPKNGTVLGLINKASRGDQFTVIPHVLTFAPRESSGNCYLPIQTSQIMDKDVLTESNLVVLPTQNFIYVIATYDVSRDDHAIVYYVYDPIRTISYTHPFRLTTKGRPDFLRIECFVWDDDLWCHQFYRFEADVTNSTTSVENLVCIRFSCNRSKP

SEQ ID NO: 109 - protein, 607 aa, Canine morbillivirus
MLSYQDKVGAFYKDNARANSSKLSLMTEEQGDRRPPYLLFVLLILLVGILALLAITGVRFHQVSTSNMEFSRLLKEDMEKSEAVHHQVIDVLTPLFKIIGDEIGLRLPQKLNEIKQFILQKTNFFNPNREFDFRDLHWCINPPSKIKVNFTNYCDTIGIKKSIASAANPILLSALSGGRGDIFPPYRCSGATTSVGRVFPLSVSLSMSLISKTAEIINMLTAISDGVYGKTYLLVPDYIEGEFDTQEIRVFEIGFIKRWLNNMPLLQTTNYMILPENSKAKVCTIAVGELTLASLCVDESTVLLSHDSNGSQDGILVVTLGIFGATLMDQVEEVIPVAHPSVEKIHITNHRGFIKDSIATWMVPALASEKQEEQQNCLESACQRRSYPMCNQTSWEPFGGRQLPSYGRLTLPIDPSIHLQLNISFTYGPVILNGDGMDYYDSPLLDSGWLTIPPKNGTVLGLINKASRGDQFTVIPHVLTFAPRESSGNCYLPIQTSQIMDKDVLTESNLVVLPTQNFRYVIATYDVSRDDHAIVYYVYDPIRTISYTYPFRLTTKGRPDFLRIECFVWDDDLWCHQFYRFEADVTNSTTSVENLVCIRFSCNRSKP

SEQ ID NO: 110 - protein, 607 aa, Canine morbillivirus; identical to SEQ ID NO: 105

SEQ ID NO: 111 - protein, 607 aa, Canine morbillivirus
MLSYQDKVGAFYKDNARANSPKLSLVTEEQGGRRPPYLLFVLLILLIGILALLAITGVRFHQVSTSNMEFSRLLKEDMEKSEAVHHQVIDVLTPLFKIIGDEIGLRLPQKLNEIKQFILQKTNFFNPNREFDFRDLHWCINPPSKIKVNFTNYCDTVGVKKSIASAANPIILSALSGARGDIFPPYRCSGATTSVGRVFPLSVSLSMSLISRTSEIINMLTAISDGVYGKTYLLVPDYIEGEFDSQKIRVFEIGFIKRWLNDMPLLQTTNYMVLPETSKAKVCTIAVGELTLASLCVDESTVWLYHDSNGSQNGILVVTLGIFGATPMDQVEEVIPVAHPSVERIHITNHRGFIKDSIVTWMVPALVSEKQEEQKNCLESACQRKSYPMCNQTSWEPFGGGQLPSYGRLTLPLDPSIDLQLNISFTYGPVILNGDGMDYYESPLSDSGWLTIPPKNGTVLGLINKASRGDQFTVTPHVLTFAPRESSGNCYLPIQTSQIMDKDVLTESNLVVLPTQNFRYVIATYDISRGDHAIVYYVYGPIRTISYTYPFRLTTKGRPDFLRIECFVWDDDLWCHQFYRFEANITNSTTSVENLVRIRFSCNRSKP

SEQ ID NO: 112 - protein, 607 aa, Canine morbillivirus
MLSYQDKVGAFYKDNARANSSKLSLVTEEQGGRRPPYLLFVLLILLIGILALLAITGVRFHQVSTSNMEFSRLLKEDMEKSEAVHHQVIDVLTPLFKIIGDEIGLRLPQKLNEIKQFILQKTNFFNPNREFDFRDLHWCINPPSKIKVNFTNYCDTVGVKKSIASAANPIILSALSGARGDIFPPYRCSGATTSVGRVFPLSVSLSMSLISRTSEIINMLTAISDGVYGKTYLLVPDYIEGEFDSQEIRVFEIGFIKRWLNDMPLLQTTNYMVLPETSKAKVCTIAVGELTLASLCVDESTVLLYHDSNGSQNGILVVTLGIFGATPMDQVEEVIPVAHPSVERIHITNHRGFIKDSIVTWMVPALVSEKQEEQKNCLESACQRKSYPMCNQTSWEPFGGGQLPSYGRLTLLLDPSIDLQLNISFTYGPVILNGDGMDYYESPLLDSGWLTVPPKNGTVLGLINKASRGDQFTVTPHVLTFAPRESSGNCYLPIQTSQIMDKDVLTESNLVVLPTQNFRYVIATYDISRGDHAIVYYVYGPIRTISYMYPFRLTTKGRPDFLRIECFVWDDDLWCHQFYRFEANITNSTTSVENLVRIRFSCNRSKP

SEQ ID NO: 113 - protein, 607 aa, Canine morbillivirus
MLSYQDKVGAFYKDNARANSSKLFLVTEEQGGRRPPYLLFVLLILLIGILALLAITGVRFHQVSTSNMEFSRLLKEDMEKSEAVHHQVIDVLTPLFKIIGDEIGLRLPQKLNEIKQFILQKTNFFNPNREFDFRDLHWCINPPSKIKVNFTNYCDTVGVKKSIASAANPIILSALSGARGDIFPPYRCSGATTSVGRVFPLSVSLSMSLISRTSEIINMLTAISDGVYGKTYLLVPDYIEGEFDSQKIRVFEIGFIKRWLNDMPLLQTTNYMVLPVTSKAKVCTIAVGELTLASLCVDESTVLLYHDSNGSQNGILVVTLGIFGATPMDQVEEVIPVAHPSVERIHITNHRGFIKDSIVTWMVPALVSEKQEEQKNCLESACQRKSYPMCNRTSWEPFGGGQLPSYGRLTLPLDPSIDLQLNISFTYGPVILNGYGMDYYESPLLDSGWLTIPPKNGTVLGLINKASRGDQFTVTPHVLTFAPRESSGNCYLPIQTSQIMDKDVLTESNLVVLPTQNFRYVIATYDISRGDHAIVYYVYDPFRTISYTYPFRLTTKGRPDFLRIECFVWDDDLWCHQFYRFEANITNSTTSVENLVHIRFSCNRSKP

SEQ ID NO: 114 - protein, 607 aa, Canine morbillivirus
MLSYQDKVGAFYKDNARANSSKLSLVTEEQGGRRPPYLLFVLLILLIGILALLAITGVRFHQVSTNNMEFSRLLKEDMEKSEAVHHQVIDVLTPLFKIIGDEIGLRLPQKLNEIKQFILQKTNFFNPNREFDFRDLHWCINPPSKIKVNFTNYCDTVGVKKSIASAANPIILSALSGARGDIFPPYRCSGATTSVGRVFPLSVSLSMSLISRTSEIINMLTAISDGVYGKTYLLVPDYIGGEFDSQKIRVFEIGFIKRWLNDMPLLQTTNYMVLPETSKAKVCTIAVGELTLASLCVDESTVLLYHDSNGSQDGILVVTLGIFGATPMDQVEEVIPIAHPSVERIHITNHRGFIKDSIVTWMVPVLVSEKQEEQKNCLESACHIKSYPMCNQTSWEPFGGGQLPSYGRLTLPLDPSIDLQLNISFTYGPVILNGDGMDYYESPLLDSGWLTIPPKNGTVLGLINKASRGDQFTVTPHVLTFAPRESSGNCYLPIQTSQIMDKDVLTESNLVVLPTQNFRYVIATYDISRGDHAIVYDVYDPIRTISYTYPFRLTTKGRPDFLRIECFVWDDDLWCHQFYRFEANITNSTTSVENLVRIRFSCNRSKP

SEQ ID NO: 115 - protein, 607 aa, Canine morbillivirus
MLSYQDKVGAFYKDNARANSSKLSLVTEEQGGRRPPYLLFVLLILLIGILALLAITGVRFHQVSTSNMEFSRLLKEDMEKSEAVHHQVIDVLTPLFKIIGDEIGLRLPQKLNEIKQFILQKTNFFNPNREFDFRDLHWCINPPSKIKVNFTNYCDTVGVKKSIASAANPIISSALSGARGDIFPPYRCSGATTSVGRVFPLSVSLSMSLISRTSEIINMLTAISDGVYGKTYLLVPDYIEEEFDSQKIRVFEIGFIKRWLNDMPLLQTTNYMVLPETSKAKVCTIAVGELTLASLCVDESTVLSYHDSNGSQNGILVVTLGIFGATPMDQVEEVIPIAHPSVERIHITNHRGFIKDSVVTWMVPVLVSEKQEEQKNCLESACQRKSYPMCNQTSWEPFGGGQLPSYGRLTLPLDPSVDLQLNISFTYGPVILNGDGMDYYESPLLESGWLTIPPKNGTVLGLINKASRGDHFTVTPHVLTFAPRESSGNCYLPIQTSQIMDKDVLTESNLVVLPTQNFRYVIATYDISRGDHAIVYYVYDPIRTISYTYPFRLTTKGRPDFLRIECFVWDDDLWCHQFYRFEANVTNSTTSVENLVRIRFSCNRSKP

SEQ ID NO: 116 - protein, 607 aa, Canine morbillivirus
MLSYQDKVGAFYKDNARANSSKLSLVTEEQGGRRPPYLLFVLLILLIGILALLAITGVRFHQVSTSNMEFSRLLKEDMEKSEAVHHQVIDVLTPLFKIIGDEIGLRLPQKLNEIKQFILQKTNFFNPNREFDFRDLHWCINPPSKIKVNFTNYCDTVGVKKSIASAANPIILSALSGARGDIFPPYRCSGATTSVGRVFPLSVSLSMSLISRTSEIINMLTAISDGMYGKTYLLVPDYIEGEFGSQKIRVFEIGFIKRWLNDMPLLQTTNYMVLPETSKAKVCTIAVGELTLASLCVDESTVLLYHDSSMSQNGILVVTLGIFGATPMDQVEEVIPIAHPSVEGIHITNHRGFIKDSIVTWMVPVLVSEKQEEQKNCLESACQRKSYPMCNQTSWGPFGGGQLPSYGRLTLPLDPSIDLQLNISFAYGPVILNGDGMDYYESPLLDSGWLTIPPKNGTVLGLINKASRGDQFTVTPHVLTFAPRESSGNCYLPIQTSQIMDKDVLTESNLVVLPTQNFRYVIATYDISRGDHAIVYYVYDPIRTISYTYPFRLTTKGRPDFLRIECFVWDDDLWCHQFYRFEANITNSTTSVENLVRIRFSCNRSKP

SEQ ID NO: 117 - protein, 607 aa, Canine morbillivirus
MLPYQDKVGAFYKDNARANSSKLSLVTEEQGGRRPPYLLFVLLILLIGILTLLAITGVRFHQVSTSNMEFSRLLKEDMEKSEAVHHQVIDVLTPLFKIIGDEIGLRLPQKLNEIKQFILQKTNFFNPNREFDFRDLHWCINPPSKIKVNFTNYCDTVGVKKSIASAANPIILSALSGARGDIFPPYRCSGATTSVGRVFSLSVSLSMSLISRTSEIINMLTAISDGVYGKTYLLVPDYIEGEFDSQKIRVFEIGFIKRWLNNIPLLQTTNYMVLPETSKAKVCTIAVGELTLASLCVDESTVLLYHDSNGSQNSILVVTLGIFGATPMDQVEEVIPIAHPSVERIHITNHRGFIKDSVVTWMVPVLVSEKQEEQKNCLESACQRKSCPMCNQTSWEPFGGGQLPSYGRLTLPLDPSVNLQLNISFTYGPVILNGDGMDYYESPLLESGWLTIPPKSGTVLGLINKASRGDQFTVTPHVLTFAPRESSGNCYLPIQTSQIMDKDVLTESNLVVLPTQNFRYVIATYDISRGNHAIVYYVYDPNRTISYTHPFRLTTKGRPDFLRIECFVWDDDLWCHQFYRFEANITNSTTSVENLVRIRFSCNRSKP

SEQ ID NO: 118 - protein, 607 aa, Canine morbillivirus
MLSYQDKVGAFYKDNARANSSKLSLVTEEQGGRRPPYLLFVLLILLIGILTLLAITGVRFHQVSTSNMEFSRLLKEDMEKSEAVHHQVIDVLTPLFKIIGDEIGLRLPQKLNEIKQFILQKTNFFNPNREFDFRDLHWCINPPSKIKVNFTNYCDTVGVKKSIASAANPIILSALSGARGDIFPPYRCSGATTSVGRVFSLSVSLSMSLISRTSEIINMLTAISDGVYGKTYLLVPDYIEGEFDSQKIRVFEIGFIKRWLNNIPLLQTTNYMVLPETSKAKVCTIAVGELTLASLCVDESTVLLYHDSNGSQNGILVVTLGIFGATPMDQVEEVIPIAHPSVERIHITNHRGFIKDSVVTWMVPVLVSGKQEEQKNCLESACQRKSYPMCNQTSWEPFGGGQLPSYGRLTLPLDPSVDLQLNISFTYGPVILNGDGMDYYESPLLESGWLTVPPKNGTVLGLINKASRGDQFTVTPYVLTFAPRESSGNCYLPIQTSQIMDKDVLTESNLVVLPTQNFRYVIATYDISRGDHAIVYYVYDPNRTISYTHPFRLTTKGRPDFLRIECFVWDDDLWCHQFYRFEANITNSTTSVENLVRIRFSCNRSKP

SEQ ID NO: 119 - protein, 607 aa, Canine morbillivirus
MLSYQDKVGAFYKDNARANSSKLSLVTEEQGGRRPPYLLFVLLILLVGILALLAIAGVRFRQVSTSNVEFGRLLKDDLEKSEAVHHQVMDVLTPLFKIIGDEIGLRLPQKLNEIKQFILQKTNFFNPNREFDFRDLHWCINPPSKIKVNFTNYCDTIGVKKSIASAANPIILSALSGVRGDIFPPYRCSGATTSVGRVFPLSVSLSMSLISKTSEIINMLTAISDGVYGKTYLLVPDYIEREFDTQKIRVFEIGFIKRWLNDMPLLQTTNYMVLPENSKAKVCTIAVGELTLASLCVDESTVLLYHDSNGSQDSILVVTLGIFGATPMNQVEEVIPVAHPSVEKIHITNHRGFIKDSVATWMVPALVSEQQEGQKNCLESACQRKSYPMCNQTSWEPFGGVQLPSYGRLTLPLDASIDLQLNISFTYGPVILNGDGMDYYESPLLDSGWLTIPPKNGTILGLINKASRGDQFTVTPHVLTFAPRESSENCYLPIQTSQIMDKDVLTESNLVVLPTQNFRYVIATYDISRENHAIVYYVYDPIRTISYTYPFRLTTKGRPDFLRIECFVWDDDLWCHQFYRFESDITSSTTSVEDLVRIRFSCNRSKP

SEQ ID NO: 120 - protein, 607 aa, Canine morbillivirus
MLSYQDKVGAFYKDNARANSSKLSLVTEEQGGRRPPYLLFVLLILLVGILALLAIAGVRFRQVSTSNVEFGRLLKDDLEKSEAVHHQVMDVLTPLFKIIGDEIGLRLPQKLNEIKQFILQKTNFFNPNREFDFRDLHWCINPPSKIKVNFTNYCDAIGVRKSIASAANPILLSALSGGRGDIFPPYRCSGATTSVGRVFPLSVSLSMSLISKTSEIISMLTAISDGVYGKTYLLVPDYIEREFDTQKIRVFEIGFIKRWLNDMPLLQTTNYMVLPENSKAKVCTIAVGELTLASLCVDESTVLLYHDSNGSQDSILVVTLGIFGATPMNQVEEVIPVAHPSVERIHITNHRGFIKDSVATWMVPALVSEQQEGQKNCLESACQRKSYPMCNQTSWEPFGGVQLPSYGRLTLPLDASIDLQLNISFTYGPVILNGDGMDYYENPLLDSGWLTIPPKNGTILGLINKASRGDKFTVTPHVLTFAPRESSGNCYLPIQTSQIMDKDVLTESNLVVLPTQNFRYVVATYDISRENHAIVYYVYDPIRTISYTYPFRLTTKGRPDFLRIECFVWDDDLWCHQFYRFESDITNSTTSVEDLVRIRFSCNRSKP

SEQ ID NO: 121 - protein, 607 aa, Canine morbillivirus
MLSYQDKVGAFYKDNARANSSKLSLVTEEQGGRRPPYLLFVLLILLVGILALLAIAGVRFRQVSTSNVEFGRLLKDDLEKSEAVHHQVMDVLTPLFKIIGDEIGLRLPQKLNEIKQFILQKTNFFNPNREFDFRDLHWCINPPSKIKVNFTNYCDTVGVKKSIASAANPIILSALSGARGDIFPPYRCSGATTSVGRVFPLSVSLSMSLISRTSEIINMLTAISDGVYGKTYLLVPDYIEGEFDSQKIRVFEIGFIKRWLNDMPLLQTTNYMVLPENSKAEVCTIAVGELTLASLCVDESTVLLYHDSNGPHDSVLVVTLGIFGATPMNQVEEVIPVAHPSVEKIHITNHRGFIKDSVATWMVPALVSEQQEGQKNCLESACQRKSYPMCNQTSWEPFGGVQLPSYGRLTLHLDASIDLQLNISFTYGPVILNGDGMDYYENPLLDSGWLTIPPKNGTILGLINKASRGDQFTVTPHVLTFAPRESSGNCYLPIQTSQIMDKDVLTESNLVVLPTQNFRYVVATYDISRGNHAIVYYVYDPIRTISYMYPFRLTTKGRPDFLRIECFVWDDDLWCHQFYRFESDITNSTTSVEDLVRIRFSCNRSKP

SEQ ID NO: 122 - protein, 607 aa, Canine morbillivirus
MLSYQDKVGAFYKDNARANSSKLSLVTEEQGGRRPPYLLFVLLILLVGILALLAITGVRFHQVSTSNMEFSRLLKEDMEKSEAVHHQVIDVLTPLFKIIGDEIGLRLPQKLNEIKQFILQKTNFFNPNREFDFRDLHWCINPPSKIKVNFTNYCDTIGIRKSIASAANPILLSALSGGRGDIFPPYRCSGATTSVGRVFPLSVSLSMSLISKTSEIINMLTAISDGVYGKTYLLVPDYIEGEFDTQKIRVFEIGFIKRWLNDMPLLQTTNYMVLPENSKAKVCTIAVGELTLASLCVDESTVLLYHDSNGSQDSILVVTLGIFGATPMDQVEEVIPVAHPSVEKIHITNHRGFIKDSVATWMVPALVSEKQEEQKNCLESACQRKSYPMCNQTSWEPFGGVQLPSYGRLTLPLDASIDLQLNISFTYGPVILNGDGMDYYESPLLDSGWLTIPPKNGTILGLINKASRGDQFTVIPHVLTFAPRESSGNCYLPIQTSQIMDKDVLTESNLVVLPTQNFRYVVATYDISRDDHAIVYYVYDPIRTISYTYPFRLTTKGRPDFLRIECFVWDDDLWCHQFYRFEADITNSTTSVENLVRIRFSCNRSKP

SEQ ID NO: 123 - protein, 607 aa, Canine morbillivirus
MLSYQDKVGAFYKDNARANSSKLSLVTEEQGGRRPPYLLFVLLILLVGILALLAIAGVRFRQVSTSNVEFGRLLKDDLEKSEAVHHQVMDVLTPLFKIIGDEIGLRLPQKLNEIKQFILQKTNFFNPNREFDFRDLHWCINPPSKIKVNFTNYCDAIGVRKSIASAANPILLSALSGGRGDIFPPYRCSGATTSVGRVFPLSVSLSMSLISKTSEIISMLTAISDGVYGKTYLLVPDYIEREFDTQKIRVFEIGFIKRWLNDMPLLQTTNYMVLPENSKAKVCTIAVGELTLASLCVDESTVLLYHDSNGSQDSILVVTLGIFGATPMNQVEEVIPVAHPSVERIHITNHRGFIKDSVATWMVPALVSEQQEGQKNCLESACQRKSYPMCNQTSWEPFGGVQLPSYGRLTLPLDASIDLQLNISFTYGPVILNGDGMDYYENPLLDSGWLTIPPKNGTILGLINKASRGDQFTVTPHVLTFAPRESSGNCYLPIQTSQIMDKDVLTESNLVVLPTQNFRYVVATYDISRKNHAIVYYVYDPIRTISYMYPFRLTTKGRPDFLRIECFVWDDDLWCHQFYRFESDITNSTTSVEDLVRIRFSCNRSKP

SEQ ID NO: 124 - protein, 607 aa, Canine morbillivirus
MLSYQDKVGAFYKDNARANSSKLSLVTEEQGGRRPPYLLFVLLILLVGILALLAIAGVRFRQVSTSNVEFGRLLKDDLEKSEAVHHQVMDVLTPLFKIIGDEIGLRLPQKLNEIKQFILQKTNFFNPNREFDFRDLHWCINPPSKIKVNFTNYCDAIGVRKSIASAANPILLSALSGGRGDIFPPYRCSGATTSVGRVFPLSVSLSMSLISKTSEIINMLTAISDGVYGKTYLLVPDYIEREFDTQKIRVFEIGFIKRWLNDMPLLQTTNYMVLPENSKAKVCTIAVGELTLASLCVDESTVLLYHDSNGSQDSILVVTLGIFGATPMNQVEEVIPVAHPSVERIHITNHRGFIKDSVATWMVPALVSEQQEGQKNCLESACQRKSYPMCNQTSWEPFGGVQLPSYGRLTLPLDASIDLQLNISFTYGPVILNGDGMDYYENPLLDSGWLTIPPKNGTILGLINKASRGDQFTVTPHVLTFAPRESSGNCYLPIQTSQIMDKDVLTESNLVVLPTQNFGYVVATYDISRENHAIVYYVYDPIRTISYTYPFRLTTKGRPDFLRIECFVWDDDLWCHQFYRFESDITNSTTSVEDLVRIRFSCNRSKP

SEQ ID NO: 125 - protein, 607 aa, Canine morbillivirus
MLSYQDKVGAFYKDNARANSSKLSLVTEEQGGRRPPYLLFVLLILLVGILALLAIAGVRFRQVSTSNVEFGRLLKDDLEKSEAVHHQVMDVLTPLFKIIGDEIGLRLPQKLNEIKQFILQKTNFFNPNREFDFRDLHWCINPPSKIKVNFTNYCDAIGVRKSIASAANPILLSALSGGRGDIFPPYRCSGATTSVGRVFPLSVSLSMSLISKTSEIISMLTAISDGVYGKTYLLVPDYIEREFDTQKIRVFEIGFIKRWLNDMPLLQTTNYMVLPENSKAKVCTIAVGELTLASLCVDESTVLLYHDSNGSQDSILVVTLGIFGATPMNQVEEVIPVAHPSVERIHITNHRGFIKDSVATWMVPALVSEQQEGQKNCLESACQRKSYPMCNQTSWEPFGGVQLPSYGRLTLPLDASIDLQLNISFTYGPVILNGDGMDYYENPLLDSGWLTIPPKNGTILGLINKASRGDQFTVTPHVLTFAPRESSGNCYLPIQTSQIMDKDVLTESNLVVLPTQNFRYVVATYDISRENHAIVYYVYDPIRTISYTYPFRLTTKGRPDFLRIECFVWDDDLWCHQFYRFESDITNSTTSVEDLVRIRFSCNRSKP

SEQ ID NO: 126 - protein, 607 aa, Canine morbillivirus
MLSYQDEVGAFYMDNARANSSKLSLVTEEQRSRRPPYLLFVLLILLVGILALLAIAGVRFRQVSTSNVEFGRLLKDDLEKSEAVHHQVMDVLTPLFKIIGDEIGLRLQQKLNGIKQFILQKTNFFNPNSEFDFRNFHWCINPPSKIKVNFTNYCDAIGVRKSIASAANPILLSILFGCRGDIFPPYRCSGAITSVGRVIPLSVSLSTSLISRTSEIISMLTAISDGLYGKTYLLVPDYIEKEFDTREIRVFEIKFIERWLNDMPLLQITNYMILGENSEAKVCTIAVDQLTLASLCVDESTVLLYYDSNGSRDSILVVTLGIFEASPMNQVEEVIPVANPSVERIHITNHRGYIIDSVATWMVPALVSERLEGQENCLESACRRESYPMCKQTSCEPFGGVQVPSYGRLTLPLDERIDLQLNISFTYGPVILNGDGMDYYENPLLDSRWLTIPPKNGTILGLINKASREDQFTVTSHVLTFAPRESSGNCYLPIQTSQIMDKDVLTESNLVVFPTQNFRYVVATYDISRRYHAIVYYVYDPIRTISYTYPFRLTTKGRPDFLRIECFVWDDDLWCHQFYRFESDITNSTTSVEDLVRIRFSCNRSEP

SEQ ID NO: 127 - protein, 607 aa, Canine morbillivirus
MLSYQDEVGAFYMDNARANSSKLSLVTEEQRSRRPPYLLFVLLILLVGILALLAIAGVRFRQVSTSNVEFGRLLKDDLEKSEAVHHQVMDVLTPLFKIIGDEIGLRLQQKLYGIKQFILQKTNFFNPNSEFDFRNFHWCINPPSKIKVNNTNYCDAIGVRKSIASAANHILLSILFGCRGDIFPPYRCSGAITSVGRVIPLSVSLSTSLISRTSEIISMLTAISDGLYGKTYLLVPDYIEKEFDTREIRVFEIKFIERWLNDMPLLQITNYMILGENSEAKVCTIAVDQLTLASLCVDESTVLLYYDSNGSRDSILVVTLGIFEASPMNQVEEVIPVANPSVERIHITNHRGYIIDSVATWMVPALVSERLEGQENCLESACRRESYPMCKQTSCEPFGGVQVPSYGRLTLPLDERIDLQLNISFTYGPVILNGDGMDYYENPLLDSRWLTIPPKNGTILGLINKASREDQFTVTSHVLTFAPRESSGNCYLPIQTSQIMDKDVLTESNLVVFPTQNFRYVVATYDISRRYHAIVYYVYDPIRTISYTYPFRLTTKGRPDFLRIECFVWDDDLWCHQFYRFESDITNSTTSVEDLVRIRFSCNRSEP

SEQ ID NO: 128 - protein, 607 aa, Canine morbillivirus; identical to SEQ ID NO: 125

SEQ ID NO: 129 - protein, 607 aa, Canine morbillivirus
MLSYQDKVGAFYKDNARANSSKLPLVTEEQGGRRPPYLLFVLLILLVGIMALLAITGVRFHQVSTSNMEFSRLLKEDMEKSEAVHHQVIDVLTPLFKIIGDEIGLRLPQKLNEIKQFILQKTNFFNPNREFDFRDLHWCINPPSKIKVNFTNYCDTIGIRKSIASAANPILLSALSGGRGDIFPPYRCSGATTSVGRIFPLSVSLSMSLISRKSEIISMITAISDGVYGKTYLLVPDYIEGEFDTQKIRVFEVGFIKRWLNDMPLLQTTNYLVLPENSKAKVCTVAVGELTLASLCVDESTVLLYHDSNGSQDGILVVTLGIFGATPMDQVEEVIPVAHPSVEKMHITNHRGFIKDSIATWMVPVLVSEKQEEQKNCLESACQRKSYPMCNQTSWEPFGGGQLPSYGRLTLPLDPSIDLQLNISFTNGPVILNGDGMDYYESPILDSGWLTIPPKNGTVLGLINKASRGDQFTVVPHVLTFAPRESSGNCYLPIQTSQIMDKDVLIESNLVVLPTQNFRYVIATYDISRDDHAIVYYVYDPIRTISYTYPFRLTTKGRPDFLRIECFVWDDDLWCHQFYRFEADITNSTTSVENSVRMRFSCNRSKP

SEQ ID NO: 130 - protein, 607 aa, Canine morbillivirus
MLSYQDKVGAFYKDNAKANSSKLSLVTEEQGGRRPPYLLFVLLILLVGIMALLAITGVRFHQVSTSNMEFSRLLKEDMEKSEAVHHQVIDVLTPLFKIIGDEIGLRLPQKLNEIKQFILQKTNFFNPNREFDFRDLHWCINPPSKIKVNFTNYCDTIGIRKSIASAANPILLSALSGGRGDIFPPYRCSGATTSVGRVFPLSVSLSMSLISRKSEIINMLTAISDGVYGKTYLLMPDYIDGEFDTQKIRVFEVGFIKRWLNDMPLLQTTNYLVLPENSKAKVCTIAVGELTLASLCVAESTVLLYHDSNGSQDGILVVTLGIFGATPMDQVEEVIPVAHPSVEKIHITNHRGFIKDSIATWMVPVLVSEKQEEQKNCLESACQRKTYPMCNQTSWEPFGGGQLPSYGRLTLPLDPSIDLQLNISFTNGPVILNGDGMDYYESPLLDSGWLTIPPKNGTVLGLINRASRGDQFTVVPHVLTFAPRESSGNCYLPIQTSQIMDKDVLIESNLVVLPTQNFRYVIATYDISRDDHAIVYYVYDPIRTISYTYPFRLTTKGRPDFLRIECFVWDDDLWCHQFYRFEADITNATTSVENSVRMRFSCNRSKP

SEQ ID NO: 131 - protein, 607 aa, Canine morbillivirus
MFSYQDKVGAFYKDNARANSSKLSLVTEEQGGRRPPYLLFVLLILLVGIMALLAITGVRFHQVSTSNMEFSRLLKEDMEKSEAVHHQVIDVLTPLFKIIGDEIGLRLPQKLNEIKQFILQKTNFFNPNREFDFRDLHWCINPPSKIRVNFTNYCDTIGIRKSIASAANPILLSALSGGRGDIFPPYRCSGATTSVGRIFPLSVSLSMSLISRKSEIISMITAISDGVYGKTYLLVPDYIEGEFDTQKIRVFEVGFIKRWLNDMPLLQTTNYLVLPENSKAKVCTIAVGELTLASLCVDESTVLLYHDSNGSQDGILVVTLGIFGATPMDQVEVVIPVAHSSVEKMHITNHRGFIKDSIATWMVPVLVSEKQEEQKNCLESACQRKSYPMCNQTSWEPFGGGQLPSYGRLTLPLDPSIDLQLNISFTNGPVILNGDGMDYYESPILDSGWLTIPPKNGTVLGLINKASRGDQFTVVPHVLTFAPRESSGNCYLPIQTSQIMDKDVLTESNLVVLPTQNFRYVIATYDISRDDHAIVYYVYDPIRTISYTYPFRLTTKGRPDFLRIECFVWDDDLWCHQFYRFDADITNSTTSVENLVRIRFSCNRSKP

SEQ ID NO: 132 - protein, 607 aa, Canine morbillivirus
MFSYQDKVGAFYKDNARANSSKLSLVTEEQGGRRPPYLLFVLLILLVGIMALLAITGVRFHQVSTSNMEFSRLLKEDMEKSEAVHHQVIDVLTPLFKIIGDEIGLRLPQKLNEIKQFILQKTNFFNPNREFDFRDLHWCINPPSKIKVNFTNYCDTIGIRKSIASAANPILLSALSGGRGDIFPPYRCSGATTSVGRIFPLSVSLSMSLISRKSEIISMITAISDGVYGKTYLLVPDYIEGEFDTQKIRVFEVGFIKRWLNDMPLLQTTNYLVLPENSKAKVCTIAVGELTLASLCVDESTVLLYHDSNGSQDGILVVTLGIFGATPMDQVEVVIPVAHSSVEKMHITNHRGFIKDSIATWMVPVLVSEKQEEQKNCLESACQRKSYPMCNQTSWEPFGGGQLPSYGRLTLPLDPSIDLQLNISFTNGPVILNGDGMDYYESPILDSGWLTIPPKNGTVLGLINKASRGDQFTVVPHVLTFAPRESSGNCYLPIQTSQIMDKDVLTESNLVVLPTQNFRYVIATYDISRDDHAIVYYVYDPIRTISYTYPFRLTTKGRPDFLRIECFVWDDDLWCHQFYRFDADITNSTTSVENLVRIRFSCNRSKP

SEQ ID NO: 133 - protein, 607 aa, Canine morbillivirus
MFSYQDKVGAFYKDNARANSSKLSLVTEEQGGRRPPYLLFVLLILLVGIMALLAITGVRFHQVSTSNMEFSRLLKEDMEKSEAVHHQVIDVLTPLFKIIGDEIGLRLPQKLNEIKQFILQKTNFFNPNREFDFRDLHWCINPPSKIKVNFTNYCDTIGIRKSIASSANPILLSALSGGRGDIFPPYSCSGATTSVGRIFPLSVSLSMSLISRKSEIISMITAISDGVYGKTYLLVPDYIEGEFDTQKIRVFEVGFIKRWLNDMPLLQTTNYLVLPENSKAKVCTIAVGELTLASLCVDESTVLLYHDSNGSQDGILVVTLGIFGATPMDQVEVVIPVAHSSVEKMHITNHRGFIKDSIATWMVPVLVSEKQEEQKNCLESACQRKSYPMCNQTSWEPFGGGQLPSYGRLTLPLDPSIDLQLNISFTNGPVILNGDGMDYYESPILDSGWLTIPPKNGTVLGLINKASRGDQFTVVPHVLTFAPRESSGNCYLPIQTSQIMDKDVLTESNLVVLPTQNFRYVIATYDISRDDHAIVYYVYDPIRTISYTYPFRLTTKGRPDFLRIECFVWDDDLWCHQFYRFDADITNSTTSVENLVRIRFSCNRSKP

SEQ ID NO: 134 - protein, 607 aa, Canine morbillivirus
MFSYQDKVGAFYKDNARANSSKLSLVTEEQGGRRPPYLLFVLLILLVGIMALLAITGVRFHQVSTSNMEFSRLLKEDMEKSEAVHHQVIDVLTPLFKIIGDEIGLRLPQKLNEIKQFILQKTNFFNPNREFDFRDLHWCINPPSKIKVNFTNYCDTIGIRKSIASAANPILLSALSGGRDDIFPPYRCSGATTSIGRIFPLSVSLSMSLISRKSEIISMITAISDGVYGKTYLLVPDYIEGEFDTQKIRVFEVGFIKRWLNDMPLLQTTNYLVLPENSKAKVCTIAVGELTLASLCVDESTVLLYHDSNGSQDGILVVTLGIFGATPMDQVEEVIPVAHSSVEKMHITNHRGFIKDSIATWMVPVLVSEKQEEQKNCLESACQRKSYPMCNQTSWEPFGGGQLPSYGRLTLPLDPSIDLQLNISFTNGPVILNGDGMDYYESPILDSGWLTIPPKNGTVLGLINKASRGDQFTVVPHVLTFAPRESSGNCYLPIQTSQIMDKDVLTESNLVVLPTQNFRYVIATYDISRDDHAIVYYVYDPIRTISYTYPFRLTTKGRPDFLRIECFVWDDDLWCHQFYRFDADITNSTTSVENLVRIRFSCNRSKP

SEQ ID NO: 135 - protein, 607 aa, Canine morbillivirus
MFSYQDKVGAFYKDNARANSSKLSLVTEEQGGRRPPYLLFVLLILLVGIMALLAITGVRFHQVSTSNMEFSRLLKEDMEKSEAVHHQVIDVLTPLFKIIGDEIGLRLPQKLNEIKQFILQKTNFFNPNREFDFRDLHWCINPPSKIKVTFTNYCDTIGIRKSIASAASPILLSALSGGRGDIFPPYRCSGATTSVGRIFPLSVSLSMSLISRKSEIISMITAISDGVYGKTYLLVPDYIEGEFDTQKIRVFEIGFIKRWLNDMPLLQTTNYLVLPENSKAKVCTIAVGELTLASLCVDESTVLLYHDSNGSQDGILVVTLGIFGATPMDQVEEVIPVAHSSVEKMHITNHRGFIKDSIATWMVPVLVSEKQEEQKNCLESACQRKSYPMCNQTSWEPFGGGQLPSYGRLTLPLDPSIDLQLNISFTNGPVILNGDGMDYYESPILDSGWLTIPPKNGTVLGLINKASRGDQFTVVPHVLTFAPRESSGNCYLPIQTSQIMDKDVLTESNLVVLPTQNFRYVIATYDISRDDHAIVYYVYDPIRTISYTYPFRLTTKGRPDFLRIECFVWDDDLWCHQFYRFDADVTNSTTSVENLVRIRFSCNRSKP

SEQ ID NO: 136 - protein, 607 aa, Canine morbillivirus
MLSYQDKVGAFYKDNARANSSKLSLVTEEQGGRRPPYLLFVLLILLVGILALLAITGVRFHQVSTSNMEFSRLLKEDMEKSEAVHHQVIDVLTPLFKIIGDEVGLRLPQKLNEIKQFILQKTNFFNPNREFDFRDLHWCINPPSKIKVNFTNYCDIIGIKESIASAANPILLSALSEGRGDIFPPYRCSGATTSVGKVFPLSVSLSMSLISRTSEVINMLTAISNGVYGKTYLLVPDYIEEEFDTQKIRVFEIGFIKRWLNNMPLLQTTNYMVLPESSKAKVCTIAVGELTLASLCVDESTVVLYHDSSGPQDSILVVTLGIFGATLMDQVEKVIPVAHPSVEKIHITNHRGFIKDSIATWMVPALASEKQEEQQTCLESACQRKTYPMCNQTSWEPFGGRQLPSYGRLTLPLDPSIDLQLNISFTYGPVILNGGGMDYYESPLLDYGWLTIPPKNGTVLGLINKASRGEQFTVIPHVLTFAPREPSGNCYLPIQTSQIMDKDVLTESNLVVLLTHNFRYVIATYDVSRDDHAIVYDVYDPIRKIYYTYPFRLTTKGRPDFLRIECFVWDDDLWCHQFYRFEADVTNSTTSVENLVRIRFSCNRSKP

SEQ ID NO: 137 - protein, 607 aa, Canine morbillivirus
MLSYQDKVGAFYKDNARANSSKLSLVTEEQGGRRPPYLLFVLLILLVGILALLAITGVRFHQVSTSNMEFSRLLKEDMEKSEAVHHQVIDVLTPLFKIIGDEVGLRLPQKLNEIKQFILQKTNFFNPNREFDFRDLHWCINPPSKIKVNFTNYCDIIGIKESIASAANPILLSALSGGRGDIFPPYRCSGATTSVGKVFPLSVSLSMSLISRTSEVINMLTAISDGVYGKTYLLVPDYIEEEFDTQKIRVFEIGFIKRWLNNMPLLQTTNYMVLPESSNAKVCTIAVGELTLASLCVDESTVVLYHDSSGPQDSILVVTLGIFGATLMDQVEKVIPVAHPSIEKIHITNHRGFIKDSIATWMVPALASEKQEEQQTCLESACQRKTYPMCNQTSWEPFGGRQLPSYGRLTLPLDPSIDLQLNISFTYGPVILNGGGMDYYESPLLDYGWLTIPPKNGTVLGLINKASRGDQFTVIPHVLTFAPRESSGNCYLPIQTSQIMDKDVLTESNLVVLLTQNFRYVIATYDVSRDDHAIVYYVYDPIRTISYTYPFRLTTKGRPDFLRIECFVWGDDLWCHQFYRFEADVTNSTTSVENLVRIKFSCNRSKP

SEQ ID NO: 138 - protein, 607 aa, Canine morbillivirus
MLSYQDKVGAFYKDNARVNSSKLSLVTEEQGGRRPPYLLFVLLILLVGILALLAITGVRFHQVSTSNMEFSRLLKEDMEKSKAVHHQVIDVLTPLFKIIGDEVGLRLPQKLNEIKQFILQKTNFFNPNREFDFRDLHWCINPPSKIKVNFTNYCDIIGIKESIASAANPILLSALSEGRGDIFPPYRCSGATTSVGKVFPLSVSLSMSLISRTSEVINMLTAISNGVYGKTYLLVPDYIEEEFDTQKIRVFEIGFIKRWLNNMPLLQTTNYMVLPESSKAKVCTIAVGELTLASLCVDESTVVLYHDSSGPQDSILVVTLGIFAATLMDQVEKVIPVAHPSVEKIHITNHRGFIKDSIATWMVPALASEKQEEQQTCLESACQRKTYPMCNQTSWEPFGGRQLPSYGRLTLPLDPSIDLQLNISFTYGPVILNGGGMDYYESPLLDYGWLTIPPKNGTVLGLINKASRGEQFTVIPHVLTFAPRESSGNCYLPIQTSQIMDKDVLTESNLVVLLTHNFRYVIATYDVSRDDHAIVYYVYDPIRTISYTYPFRLTTKGRPDFLRIECFVWDDDLWCHQFYRFEADVTNSTTSVENLVRIRFSCNRSKP

SEQ ID NO: 139 - protein, 607 aa, Canine morbillivirus
MLSYQDKVGAFYKDNTRANSSKLSLVTEEQGGRRPPYLLFVLLILLVGILALLAITGVRFHQVSTSNMEFSRLLKEDMEKSEAVHHQVIDVLTPLFKIIGDEVGLRLPQKLNEIKQFILQKTNFFNPNREFDFRDLHWCINPPSKIKVNFTNYCDIIGIKESIASAANPILLSALSGGRGDIFPPYRCSGATTSVGKVFPLSVSLSMSLISRTSEVINMLTAISDGVYGKTYLLVPDYIEEEFDTQKIRVFEIGFIKRWLNNMPLLQTTNYMVLPESSNAKVCTIAVGELTLASLCVDESTVVLYHDSSGPQDSILVVTLGIFGATLMDQVEKVIPVAHPSIEKIHITNHRGFIKDSIATWMVPALASEKQEEQQTCLESACQRKTYPMCNQTSWEPFGGRQLPSYGRLTLPLDPSIDLQLNISFTYGPVILNGGGMDYYESPLLDYGWLTIPPKNGTVLGLINKASRGDQFTVIPHVLTFAPRESSGNCYLPIQTSQIMDKDVLTESNLVVLLTQNFRYVIATYDVSRDDHAIVYYVYDPIRTISYTHPFRLTTKGRPDFLRIECFVWDDDLWCHQFYRFEADVTNSTTSVENLVRIRFSCNRSKP

SEQ ID NO: 140 - protein, 607 aa, Canine morbillivirus
MLSYQDKVGAFYKDNARANSSKLSLVTEEQGGRRPPYLLFVLLILLIGILALLAITGVRFHQVSTSNMEFSRLLKEDMEKSEAVHHQVIDVLTPLFKIIGDEVGLRLPQKLNEIKQFILQKTNFFNPNREFDFRDLHWCINHPSKIKVNFTNYCDIIGIKESIASAANPILLSALSEGRGDIFPPYRCSGATTSVGKVFPLSVSLSMSLISRTSEVINMITAISDGVYGKTYLLVPDYIEEEFDTQKIRVFEIGFIKRWLNNMPLLQTTNYMVLPESSKAKVCTIAVGELTLASLCVDESTVVLYHDSSGPQDSILVVTLGIFGATLMDQVEKVIPVAHPSIEKIHITNHRGFIKDSIATWMVPALASEKQEEQQTCLESACQRKTYPMCNQTSWEPFGGRQLPSYGRLTLPLDPSIDLQLNISFTYGPVILNGGGMDYYESPLLDYGWLTIPPKNGTVLGLINKASRGDQFTVIPHVLTFAPRESSGNCYLPIQTSQIMDKDVLTESNLVVLLTQNFRYVIATYDVSRGDHAIVYYVYDPIRTISYTYPFRLTTKGRPDFLRIECFVWDDDLWCHQFYRFEADVTNSTTSVENLVRIRFSCNRSKP

SEQ ID NO: 141 - protein, 607 aa, Canine morbillivirus
MLSYQDKVGAFYKDNARANSSKLSLVTEEQGGRRPPYLLFVLLILLVGILALLAITGVRFHQVSTSNMEFSRLLKEDMEKSEAVHHQVIDVLTPLFKIIGDEVGLRLPQKLNEIKQFILQKTNFFNPNREFDFRDLHWCINPPSKIKVNFTNYCDIIGIKESIASAANPILLSALSGGRGDIFPPYRCSGATTSVGKVFPLSVSLSMSLISRTSEVINMLTAISDGVYGKTYLLVPDYIEEKFDTQKIRVFEIGFIKRWLNNMPLLQTTNYMVLPESSNAKVCTIAVGELTLASLCVDESTVVLYHDSSGPQDSILVVTLGIFGATLMDQVEKVIPVAHPSIEKIHITNHRGFIKDSIATWMVPALASEKQEEQQTCLESACQRKTYPMCNQTSWEPFGGRQLPSYGRLTLPLDPSIDLQLNISFTYGPVILNGGGMDYYESPLLGYGWLTIPPKNGTVLGLINKASRGDQFTVIPHVLTFAPRESSGNCYLPIQTSQIMDKDVLTESNLVVLLTQNFRYVIATYDVSRDDHAIVYYVYDPIRTISYTYPFRLTTKGRPDFLRIECFVWDDDLWCHQFYRFEADVTNSTTSVENLVRIRFSCNRSKP

SEQ ID NO: 142 - protein, 607 aa, Canine morbillivirus
MLSYQDKVGAFYKDNARANSSKLSLVTEEQGGRRPPYLLFVLLILLVGILALLAITGVRFHQVSTSNMEFSRLLKEDMEKSEAVHHQVIDVLTPLFKIIGDEVGLRLPQKLNEIKQFILQKTNFFNPNREFDFRDLHWCINPPSKIKVNFTNYCDIIGIKESIASAANPILLSALSGGRGDIFPPYRCSGATTSVGKVFPLSVSLSMSLISRTSEVINMLTAISDGVYGKTYLLVPDYIEEEFDTQKIRVFEIGFIKRWLNNMPLLQTTNYMVLPESSNAKVCTIAVGELTLASLCVDESTVVLYHDSSGPQDSILVVTLGIFGATLMDQVEKVIPVAHPSIEKIHITNHRGFIKDSIATWMVPALASEKQEEQQTCLESACQRKTYPMCNQTSWEPFGGRQLPSYGRLTLPLDPSIDLQLNISFTYGPVILNGGGMDYYESPLLDYGWLTIPPKNGTVLGLINKASRGDQFTVIPHVLTFAPRESSGNCYLPIQTSQIMDKDVLTESNLVVLLTQNFRYVIATYDVSRDDHAIVCYVYDPIRTISYTYPFRLTTKGRPDFLRIECFVWDDDLWCHQFYRFEADVTNSTTSVENLVRIRFSCNRSKP

SEQ ID NO: 143 - protein, 607 aa, Canine morbillivirus
MLSYQDKVGAFYKDNARANSSKLSLVTEEQGRRRPPYLLFVLLILLVGILALLAITGVRFHQVSTSNMEFSRLLKEDMEKSEAVHHQVIDVLTPLFKIIGDEIGLRLPQKLNEIKQFILQKTNFFNPNREFDFRDLHWCINPPSKIKVNFTNYCDMIGIKESIASAANPILLSSLSGGRGDIFPPYRCSGATTSVGRVFPLSVSLSMSLISRTSEIINMLTAISDGVYGKTYLLVPDYIEEEFDTQKIRVFEIGFIKRWLNNMSLLQTTNYMVLPESSKAKVCTIAVGELTLASLCVDESTVVLSHDDSGPQDSILVVTLGIFGATLMDQVEKVIPVAHPSVEKIHITNHRGFIKDSIATWMVPALASEKQEEQQNCLESACQRKTYPMCNQTSWEPFGGGRLPSYGRLTLPLDPSIDLQINISFTYGPVILNGGGMDYYESPLLDSGWLTIPPKNGTVLGLINKASRGDQFTVIPHVLTFAPRESSGNCYLPIQTSQIMDKDVLTESNLVVLRTQNFRYVIATYDVSRNDHAIVYYVYDPIRTISYTYPFRLTTKGRPDFLRIECFVWDDDLWCHQFYRFEADVTNSTTSVENLVHIRFSFNRSKP

SEQ ID NO: 144 - protein, 607 aa, Canine morbillivirus
MLSYQDKVGAFYKDNARANSSKLSLVTEEQGGRRPPYLLFVLLILLVGILALLAITGVRFHQVSTSNMEFSRLLKEDMEKSEAVHHQVIDVLTPLFKIIGDEIGLRLPQKLNEIKQFILQKTNFFNPNREFDFRDLHWCINPPSKIKVNFTNYCDIIGIKESIASAANPILLSALSGGRGDIFPPYRCNGATTSVGRVFPLSVSLSMSLISRTSEIINMLTAISDGVYGKTYLLVPDYIEEEFDTQKIRVFEIGFIKRWLNNMPLLQTTNYMVLPESSKAKVCTIAVGELTLASLCVDESTVVLYHDSSGPQDSILVVTLGMFGATLMDQVEKVIPVAHPSVEKIHITNHRGFIKDSIATWMVPALASEKQEEQQNCLESACQRKTYPMCNQTSWEPFGGRQLPSYGRLTLSLDPSIDLQLNISFTYGPVILNGGGMDYYESPLLDSGWLTIPPKNGTVLGLINKASRGDQFTVIPHVLTFAPRESSGNCYLPIQTSQIMDKDVLTESNLVVLLTQNFRYVVATYDVSRDDHAIVYYVYDPIRTISYTYPFRLTTKGRPDFLRIECFVWDDDLWCHQFYRFEADVTNSTTSVENLVRIRFSCNRSKP

SEQ ID NO: 145 - protein, 527 aa, Canine morbillivirus
SEAVHHQVIDVLTPLFKIIGDEIGLRLPQKLNEIKQFILQKTNFFNPNREFDFRDLHWCINPPSKIKVNFTNYCDTIGIRKSIASAANPILLSALSGGRGDIFPPYRCNGATISVGKIFPLSVSLSMSLISRTSEIINMLTAISDGVYGKTYLLMPDYIEGEFDTQKIRVFEIGFIKRWLNDMPLLQTTNYMVLPENSRAKVCTIAVGELTLASLCVDESTVLLYHDSNGSQDGVLVVTLGIFGATSMDQVEEVIPVADPLVEKIHITNHRGIIKDSIATWMVPALVSEKQEEQKNCLESACQRKSYPMCNQTSWEPFGGGQLPSYGRLTLPLDPSIDLQLNISFTYGPIILNGDGMDYYESPLLDSGWLTIPPKNGTVLGLINKASRGDQFTVIPHVLTFAPRESSGNCYLPIQTSQIMDKDVLTESNLVVLSTQNFRYVVATYDISRDDHAIVYYVYDPIRTISYTYPFRLTTKGRPDFLRIECFVWDDDLWCHQFYRFEADITNSTTSVENLVRMRFSCNRSKP

SEQ ID NO: 146 - protein, 662 aa, Canine morbillivirus
MHKGIPKSSKPQTHTQQDRPPQPSTEPEETRTSRARHSITSAQRSTHSDPRTSDRPVSYTMNRIRSRKQTSHRLKNIPVHGNHEAIIQHMPESVSKGARSQIERRQPNAINSGSQCTWLVLWCLGIASLFLCSKAQIHWNNLSTIGIIGTDSVHYKIMTRPSHQYLVIKLMPNVSLIDNCTKAELGEYEKLLNSVLEPINQALTLMTKNVKPLQSLGSGRRQRRFVGVVLAGAALGVATAAQITAGIALHQSNLNAQAIQSLRTSLEQSNKAIEEIREATQETVIAVQGVQDYVNNELVPAMQHMSCELVGQRLGLRLLRYYTELLSIFGPSLRDPISAEISIQALSYALGGEIHKILEKLGYSGGDMIAILESRGIKTKITHVDLPGKFIILSISYPTLSEVKGVIVHRLEAVSYNIGSQEWYTTVPRYIATNGYLISNFDESSCVFVSKSAICSQNSLYPMSPLLQQCIRGDTSSCARTLVSGTMGNKFILSKGNIVANCASILCKCYSTSTIINQSPDKLLTFIASDTCPLVEIDGVTIQVGGRQYPDMVYEGKVALGPAISLERLDVGTNLGNALKKLDDAKVLIDSSNQILETVRRSSFNFGSLLSVPILSCTALALLLLIYCCKRRYQQTLKQHTKVDPAFKPDLTGTSKSYVRSL

SEQ ID NO: 147 - protein, 662 aa, Canine morbillivirus
MHKGIPKSSKPQTHTQQDRPPQPSTEPEETRTSRARHSITSAQRSTHSDPRTSDRPVSYTMNRIRSRKQTSHRLKNIPVHGNHEAIIQHMPESVSKGARSQIERRQPNAINSGSQCTWLVLWCLGIASLFLCSKAQIHWNNLSTIGIIGTDSVHYKIMTRPSHQYLVIKLMPNVSLIDNCTKAELGEYEKLLNSVLEPINQALTLMTKNVKPLQSLGSGRRQRRFVGVVLAGAALGVATAAQITAGIALHQSNLNAQAIQSLRTSLEQSNKAIEEIREATQETVIAVQGVQDYVNNELVPAMQHMSCELVGQRLGLRLLRYYTELLSIFGPSLRDPISAEISIQALSYALGGEIHKILEKLGYSGGDMIAILESRGIKTKITHVDLPGKFIILSISYPTLSEVKGVIVHRLEAVSYNIGSQEWYTTVPRYIATNGYLISNFDESSCVFVSKSAICSQNSLYPMSPLLQQCIRGDTSSCARTLVSGTMGNKFILSKGNIVANCASILCKCYSTSTIINQSPDKLLTFIASDTCPLVEIDGVTIQVGGRQYPDMVYEGKVALGPAISLERLDVGTNLGNALKKLDDAKVLIDSSNQILETVRRSSFNFGSLLSVPILSCTALALLLLIYCCKRRYQQTLKQHTKVDPAFKRDLTGTSKSYVRSL

SEQ ID NO: 148 - protein, 662 aa, Canine morbillivirus
MHRGIPKSSKTQTHTQQDRPPQPSTELEETRTSRARHSTTSAQRSTHYDPRTSDRPVSYTMNRTRSRKQTSHRLKNIPVHGNHEATIQHIPESVSKGARSQIERRQPNAINSGSHCTWLVLWCLGMASLFLCSKAQIHWNNLSTIGIIGTDSVHYKIMTRPSHQYLVIKLMPNVSLIENCTKAELGEYEKLLNSVLEPINQALTLMTKNVKPLQSLGSGRRQRRFAGVVLAGVALGVATAAQITAGIALHQSNLNAQAIQSLRTSLEQSNKAIEEIREATQETVIAVQGVQDYVNNELVPAMQHMSCELVGQRLGLRLLRYYTELLSIFGPSLRDPISAEISIQALIYALGGEIHKILEKLGYSGSDMIAILESRGIKTKITHVDLPGKFIILSISYPTLSEVKGVIVHRLEAVSYNIGSQEWYTTVPRYIATNGYLISNFDESSCVFVSESAICSQNSLYPMSPLLQQCIRGDTSSCARTLVSGTMGNKFILSKGNIVANCASILCKCYSTSTIINQSPDKLLTFIASDTCPLVEIDGATIQVGGRQYPDMVYEGKVALGPAISLDRLDVGTNLGNALKKLDDAKVLIDSSNQILETVRRSSFNFGSLLSVPILSCTALALLLLIYCCKRRYQQTLKQHTKVDPAFKPDLTGTSKSYVRSL

SEQ ID NO: 149 - protein, 662 aa, Canine morbillivirus
MHKGIPKSSKTQTHTQQDRPPQPSTELEETRTSRARHSTTSAQRSTHYDPRTSDRPVSYTMNRTRSRKQTSHRLKNIPVHGNHEATIQHIPESVSKGARSQIERRQPNAINSGSQCTWLVLWCLGMASLFLCSKAQIHWNNLSTIGIIGTDSVHYKIMTRPSHQYLVIKLMPNVSLIENCTKAELGEYEKLLNSVLEPINQALTLMTKNVKPLQSLGSGRRQRRFAGVVLAGVALGVATAAQITAGIALHQSNLNAQAIQSLRTSLEQSNKAIEEIREATQETVIAVQGVQDYVNNELVPAMQHMSCELVGQRLGLRLLRYYTELLSIFGPSLRDPISAEISIQALIYALGGEIHKILEKLGYSGSDMIAILESRGIKTKITHVDLPGKFIILSISYPTLSEVKGVIVHRLEAVSYNIGSQEWYTTVPRYIATNGYLISNFDESSCVFVSESAICSQNSLYPMSPLLQQCIRGDTSSCARTLVSGTMGNKFILSKGNIVANCASILCKCYSTSTIINQSPDKLLTFIASDTCPLVEIDGATIQVGGRQYPDMVYEGKVALGPAISLDRLDVGTNLGNALKKLDDAKVLIDSSNQILETVRRSSFNFGSLLSVPILSCTALALLLLIYCCKRRYQQTLKQHTKVDPAFKPDLTGTSKSYVRSL

SEQ ID NO: 150 - protein, 662 aa, Canine morbillivirus
MHKGIPKSSKTQTHTQQDRPPQPSTELEETRTSRARHSTTSAQRSTHYDPRTSDRPVSYTMNRTRSRKQTSHRLKNIPVHGNHEATIQHIPESVSKGARSQIERRQPNAINSGSQCTWLVLWCLGMASLFLCSKAQIHWNNLSTIGIIGTDSVHYKIMTRPSHQYLVIKLMPNVSLIENCTKAELGEYEKLLNSVLEPINQALTLMTKNVKPLQSLGSGRRQRRFAGVVLAGVALGVATAAQITAGIALHQSNLNAQAIQSLRTSLEQSNKAIEEIREATQETVIAVQGVQDYVNNELVPAMQHMSCELVGQRLGLRLLRYYTELLSIFGPSLRDPISAEISIQALIYALGGEIHKILEKLGYSGSDMIAILESRGIKTKITHVDLPGKFIILSISYPTLSEVKGVIVHRLEAVSYNIGSQEWYTTVPRYIATNGYLISNFDESSCVFVSESAICSQNSLYPMSPLLQQCIRGDTSSCARTLVSGTMGNKFILSKGNIVANCASILCKCYSTSTIINQSPDKLLTFIASDTCPLVEINGATIQVGGRQYPDMVYEGKVALGPAISLDRLDVGTNLGIALKKLDDAKVLIDSSNQILETVRRSSFNFGSLLSVPILSCTALALLLLIYCCKRRYQQTLKQHTKVDPAFKPDLTGTSKSYVRSL

SEQ ID NO: 151 - protein, 662 aa, Canine morbillivirus
MHKAIPKSSKTHTHTQQNRPSQPSTGPDETRTSRARHSITSAQRSTHYDPRTLDRPVSYTMNRTRSRKQTSYRLENISVHGNHEAIIQHMPESVSKGARSQIERRRPNAINSGSQCSWLVLWCLGIASLFLCSKAQIHWNNLSTIGIIGTDSVHYKIMARPSHQYLVIKLMPNVSLIDNCTKAELVEYEKLLNSVLEPINQALTLMTKNVKPLQSLGSARRQRRFAGVVLAGAALGVATAAQITAGIALHQSNLNAQAIQSLRTSLEQSNKAIEEIREATQETVIAVQGVQDYVNNELVPAMQHMSCELVGQRLGLKLLRYYTELLSIFGPSLRDPISAEISIQALSYALGGEIHKILEKLGYSGGDMIAILESRGIKTKITHVDIPGKFIILSISYPTLSEVKGVIVHRLEAVSYNIGSQEWYTTVPRYIATNGYLISNFDESSCVFVSESAICSQNSLYPMSPLLQQCIRGDTSSCARTLVSGTMGNKFILSKGNIVANCASILCKCYSTSTIINQSPDKLLTFIASDTCPLVEIDGVTIQVGGRQYPDMVYESKVALGPAISLERLDVGTNLGNALKKLDDAKVLIDSSNQILETVRRSSFNFGSLLSVPILSGTALALLLLIYCCKRRYQQTLKRNTKVDPAFKPDLTGTSKSYVRSL

SEQ ID NO: 152 - protein, 662 aa, Canine morbillivirus
MHKEIPKSSKTHTHTQQNRPPQPSTGPDETRTSRARHSITSAQRSTNYDPRTLDRPVSYTMNRTRSRKQTSYRLENISVHGNHEAIIQHMPESVSKGARSQIERRQPNAINSGSQCSWLVLWCLGIASLFLCSKAQIHWNNLSTIGIIGTDSVHYKIMARPSHQYLVIKLMPNVSLIDNCTKAELGEYEKLLNSVLEPINQALTLMTKNVKPLQSLGSARRQRRFAGVVLAGAALGVATAAQITAGIALHQSNLNAQAIQSLRTSLEQSNKAIEEIREATQETVIAVQGVQDYVNNELVPAMQHMSCELVGQRLGLKLLRYYTELLSIFGPSLRDPISAEISIQALSYALGGEIHKILEKLGYSGGDMIAILESRGIKTKITHVDIPGKFIILSISYPTLSEVKGVIVHRLEAVSYNIGSQEWYTTVPRYIATNGYLISNFDESSCVFVSESAICSQNSLYPMSPLLQQCIRGDTSSCARTLVSGTMGNKFILSKGNIVANCASILCKCYSTSTIINQSPDKLLTFIASDTCPLVEIDGVTIQVGGRQYPDMVYESKVALGPAISLERLDVGTNLGNALKKLDDAKVLIDSSNQILETVRRSSFNFGSLLSVPILSGTALALLLLIYCCKRRYQQTLKRNTKVDPAFKPDLTGTSKSYVRSL

SEQ ID NO: 153 - protein, 662 aa, Canine morbillivirus; identical to SEQ ID NO: 152

SEQ ID NO: 154 - protein, 662 aa, Canine morbillivirus
MHKEIPKSSKTHTHTQQNRPPQPSTGPDETRTSRARHSITSAQRSTNYDPRTLDRPVSYTMNRTRSRKQTSYRLENISVHGNHEAIIQHMPESVSKGARSQIERRQPNAINSGSQCSWLVLWCLGIASLFLCSKAQIHWNNLSTIGIIGTDSVHYKIMARPSHQYLVIKLMPNVSLIDNCTKAELGEYEKLLNSVLEPINQALTLMTKNVKPLESLGSARRQRRFAGVVLAGAALGVATAAQITAGIALHQSNLNAQAIQSLRTSLEQSNKAIEEIREATQETVIAVQGVQDYVNNELVPAMQHMSCELVGQRLGLKLLRYYTELLSIFGPSLRDPISAEISIQALSYALGGEIHKILEKLGYSGGDMIAILESRGIKTKITHVDIPGKFIILSISYPTLSEVKGVIVHRLEAVSYNIGSQEWYTTVPRYIATNGYLISNFDESSCVFVSESAICSQNSLYPMSPLLQQCIRGDTSSCARTLVSGTMGNKFILSKGNIVANCASILCKCYSTSTIINQSPDKLLTFIASDTCPLVEIDGVTIQVGGRQYPDMVYESKVALGPAISLERLDVGTNLGNALKKLDDAKVLIDSSNQILETVRRSSFNFGSLLSVPILSGTALALLLLIYCCKRRYQQTLKRNTKVDPAFKPDLTGTSKSYVRSL

SEQ ID NO: 155 - protein, 662 aa, Canine morbillivirus
MHNKIPKGSKTSTPTQQDPPPQHSIKSAGAKVSQARHNTTSAHQSTRHGPRISDRPTHYIMNRTRSCKQASYRSDNIPAHGDHECIIHHTPESVSQGVRSRFKRRQSNATSSGSQCTWLVLWCIGVASLFLCSKAQIHWNNLSTIGIIGTDSVHYKIMTRPSHQYLVIKLMPNVSLIDNCTKAELGEYEKLLSSVLEPINQALTLMTKNVKPLQSVGSGRRQRRFAGVVLAGAALGVATAAQITAGIALHQSNLNAQAIQSLRASLEQSNKAIEEIREATQETIIAVQGVQDYVNNELVPAMQHMSCELVGQRLGLKLLRYYTELLSIFGPSLRDPISAEISIQALSYALGGEIHKILEKLGYSGNDMIAILESRGIKTKITHVDIPGKLIILSISYPTLSEVKGVIVHRLEAVSYNIGSQEWYTTVPRYVATNGYLISNFDESSCVFVSESAICSQNSLYPMSPLLQQCIRGDTSSCARTLVSGTMGNKFILSKGNIVANCASILCKCYSTSTMISQSPDKLLTFIASDTCPLVEIDGVTIQVGGRQYPDMVYESKVALGPAISLERLDVGTNLGNALKKLDDAKILIDSSNQILETVRRSSFNFGSLLSVLILICTALALLFLIYCCKRRYQQTLKQHTKVDPTFKPDLTGTSKSYVRSL

SEQ ID NO: 156 - protein, 662 aa, Canine morbillivirus
MHNKIPKGSKTSTPTQPEPPPQHSIKSAGAKVSQARHNTTSAHQSTRHGPRISDRPTHYIMNRTRSCKQASYRSDNIPAHGDHECIIHHTPESVSQGVRSRFKRRQSNATSSGSQCTWLVLWCIGVASLFLCSRAQIHWNNLSTIGIIGTDSVHYKIMTRPSHQYLVIKLMPNVSLIDNCTKAELGEYEKLLSSVLEPINQALTLMTKNVKPLQSVGSGRRQRRFAGVVLAGAALGVATAAQITAGIALHQSNLNAQAIQSLRASLEQSNKAIEEIREATQETIIAVQGVQDYVNNELVPAMQHMSCELVGQRLGLKLLRYYTELLSIFGPSLRDPISAEISIQALSYALGGEIHKILEKLGYSGNDMIAILESRGIKTKITHVDIPGKLIILSISYPTLSEVKGVIVHRLEAVSYNIGSQEWYTTVPRYVATNGYLISNFDESSCVFVSESAICSQNSLYPMSPLLQQCIRGDTSSCARTLVSGTMGNKFILSKGNIVANCASILCKCYSTSTMISQSPDKLLTFIASDTCPLVEIDGVTIQVGGRQYPDMVYESKVALGPAISLERLDVGTNLGNALKKLDDAKILIDSSNQILETVRRSSFNFGSLLSVLILICTALALLFLIYCCKRRYQQTLKQHTKVDPTFKPDLTGTSKSYVRSL

SEQ ID NO: 157 - protein, 662 aa, Canine morbillivirus
MHNKTPKGSKTPTPTQQDPPPQHSIKSAGAKASQARHNTTSAHQSTRHGPRISDRPTHYIMNRTRCCKQASYRSDNIPAHGDHECIIHHTPESVSQGVRSRFKRRQSNATSSGSQCTWLVLWCIGVASLFLCSKAQIHWNNLSTIGIIGTDSVHYKIMTRPSHQYLVIKLMPNVSLIDNCTKAELGEYEKLLSSVLEPINQALTLMTKNVKPLQSVGSGRRQRRFAGVVLAGAALGVATAAQITAGIALHQSNLNAQAIQSLRASLEQSNKAIEEIREATQETIIAVQGVQDYVNNELVPAMQHMSCELVGQRLGLKLLRYYTELLSIFGPSLRDPISAEISIQALSYALGGEIHKILEKLGYSGNDMIAILESRGIKTKITHVDIPGKLIILSISYPTLSEVKGVIVHRLEAVSYNIGSQEWYTTVPRYVATNGYLISNFDESSCVFVSESAICSQNSLYPMSPLLQQCIRGDTSSCARTLVSGTMGNKFILSKGNIVANCASILCKCYSTSTMISQSPDKLLTFIASDTCPLVEIDGVTIQVGGRQYPDMVYESKVALGPAISLERLDVGTNLGNALKKLDDAKILIDSSNQILETVRRSSFNFGSLLSVLILICTALALLFLIYCCKRRYQQTLKQHTKVDPTFKPDLTGTSKSYVRSL

SEQ ID NO: 158 - protein, 662 aa, Canine morbillivirus
MHNKIPKGSKTPTPTQQDPPPQHSIKSAETKTSQARYNITSAQQSTRHGPRTSDRPVHYIMNRTRSCKQASYRSDNIPAHGDHEGIIHHTPESVSQGVRSRFKRRQSNATSSGSQCTWLVLWCIGVASLFLCSKAQIHWNNLSTIGIIGTDSVHYKIMTRPSHQYLVIKLMPNVSLIDNCTKAELGEYEKLLSSVLEPINQALTLMTKNVKPLQSVGSGRRQRRFAGVVLAGAALGVATAAQITAGIALHQSNLNAQAIQSLRTSLEQSNKAIEEIREATQETIIAVQGVQDYVNNELVPAMQHMSCELVGQRLGLKLLRYYTELLSIFGPSLRDPISAEISIQALSYALGGEIHKILEKLGYSGNDMIAILESRGIKTKITHVDIPGKLIILSISYPTLSEVKGVIVHRLEAVSYNIGSQEWYTTVPRYVATNGYLISNFDESSCVFVSESAICSQNSLYPMSPLLQQCIRGDTSSCARTLVSGTMGNKFILSKGNIVANCASILCKCYSTSTIINQSPDKLLTFIASDTCPLVEIDGVTIQVGGRQYPDMVYESKVALGPAISLERLDVGTNLGNALKKLDDAKILIDSSNQILETVRRSSFNFGSLLSVPILICTALALLFLIYCCKRRYQQTLKQHTKVDPTFKPDLTGTSKSYVRSL

SEQ ID NO: 159 - protein, 662 aa, Canine morbillivirus
MHNKIPKGSKIPTPTQQDPSPQHSIKSAETKTSQARHNTTSAQRPTRHGPRTSDRPVHYIMNRTRPCKQASYRSDNIPAHEDHEGIIHHTPESVSQGVRSRFKRRQSNATISGSQCTWLVLWCIGIASLFLCSKAQIHWNNLSTIGIIGTDSVHYKIMTRPSHQYLVIKLMPNVSLIDNCTKAELGEYEKLLSSVLEPISQALTLMTKNVKPLQSVGSGRRQRRFAGVVLAGAALGVATAAQITAGIALHQSNLNAQAIQSLRTSLEQSNKAIEEIREATQETIIAVQGVQDYVNNELVPAMQHMSCELVGQRLGLKLLRYYTELLSIFGPSLRDPISAEISIQALSYALGGEIHKILEKLGYSGNDMIAILESRGIKTKITHVDIPGKLIILSISYPTLSEVKGVIVHRLEAVSYNIGSQEWYTTVPRYVATNGYLISNFDESSCVFVSESAICSQNSLYPMSPLLQQCIRGDTSSCARTLVSGTMGNKFILSKGNIVANCASILCKCYSTSTIINQSPDKLLTFIASDTCPLVEIDGVTIQVGGRQYPDMVYESKVALGPAISLERLDVGTNLGNALKKLDDAKILIDSSNQILETVKRSSFNFGSLLSVPILICTALVLLFLIYCCKRRYQQTLKQHTRVDPTFKPDLTGTSKSYVRSL

SEQ ID NO: 160 - protein, 662 aa, Canine morbillivirus
MHNKIPKGSKILTPTQQDLPQRHNIKSAETRTSPARHSITSARRSTRHGPRTSDRPVHYIMNRTRSCKQASHRSDNIPAHGDHEGIVHHTPESVSQGMRSRFKRRQSSATSSGSQCTWLVLWCIGIASLFLCSKAQIHWNNLSTIGIIGTDSVHYKIMTRPSHQYLVIKLMPNVSLIDNCTKAELGEYEKLLSSVLEPINQALTLMTKNVKPLQSVGSGRRQRRFAGVVLAGAALGVATAAQITAGIALHQSNLNAQAIQSLRTSLEQSNKAIEEIREATQETVIAVQGVQDYVNNELVPAMQHMSCELVGQRLGLKLLRYYTELLSIFGPSLRDPISAEISIQALSYALGGEIQKILEKLGYSGNDMIAILESRGIKTKITHVDLPGKLIILSISYPTLSEVKGVIVHRLEAVSYNIGSQEWYTTVPRYVATNGYLISNFDESSCVFVSESAICSQNSLYPMSPLLQQCIRGDTSSCARTLVSGTMGNKFILSKGNIVANCASILCKCYSTGTIINQSPDKLLTFIASDTCPLVEIDGVTIQVGGRQYPDMVYESKVALGPAISLERLDVGTNLGNALKKLDDAKILIDSSNQILETVRRSSFNFGSLLSVPILICTALVLLFLIYCCKRRYQQTLKQHTKVDPTFKPDLTGTSKSYVRSL

SEQ ID NO: 161 - protein, 662 aa, Canine morbillivirus
MHNKIPKGSKTLTTTQQDFPQRHSIKSAETQTSQARHSITSAQRSARHGPRTSDRPVHYIMNRTRSCKQASYRSDNIPAHKDHEGIIHHTPERVSQGMRFRFKRRQSSATSSGSQCTWLVLWCIGIASLFLCSKAQIHWNNLSTIGIIGTDSVHYKIMTRPSHQYLVIKLMPNVSLIDNCTKAELGEYEKLLSSVLEPINQALTLMTKNVKPLQSVGSGRRQRRFAGVVLAGAALGVATAAQITAGIALHQSNLNAQAIQSLRTSLEQSNKAIEEIREATQETIIAVQGVQDYVNNELVPAMQHMSCELVGQRLGLKLLRYYTELLSIFGPSLRDPISAEISIQALSYALGGEIHKILEKLGYSGNDMIAILESRGIKTKITHVDLPGKLIILSISYPTLSEVKGVIVHRLEAVSYNIGSQEWYTTVPRYVATNGYLISNFDESSCVFVSESAICSQNSLYPMSPLLQQCIRGDTSSCARTLVSGTMGNKFILSKGNIVANCASILCKCYSTGTIINQSPDKLLTFIASDTCPLVEIDGVTIQVGGRQYPDMVYESKVALGPAISLERLDVGTNLGNALKKLDDAKILIDSSNQILETVRRSSFNFGSLLSVPILICIALVLLFLICCCKRRYLQTLKQHTKVDPTFKPDLTGTSKSYVRSL

SEQ ID NO: 162 - protein, 661 aa, Canine morbillivirus
MHNKIPKGSKTLTTTQQDFPQRHSIKSAETQTSQARHSITSAQRSARHGPRTSDRPVHYIMNRTRSCKQASYRSDNIPAHKDHEGIIHHTPERVSQGMRFRFKRRQSSATSSGSQCTWLVLWCIGIASLFLCSKAQIHWNNLSTIGIIGTDSVHYKIMTRPSHQYLVKLMPNVSLIDNCTKAELGEYEKLLSSVLEPINQALTLMTKNVKPLQSVGSGRRQRRFAGVVLAGAALGVATAAQITAGIALHQSNLNAQAIQSLRTSLEQSNKAIEEIREATQETIIAVQGVQDYVNNELVPAMQHMSCELVGQRLGLKLLRYYTELLSIFGPSLRDPISAEISIQALSYALGGEIHKILEKLGYSGNDMIAILESRGIKTKITHVDLPGKLIILSISYPTLSEVKGVIVHRLEAVSYNIGSQEWYTTVPRYVATNGYLISNFDESSCVFVSESAICSQNSLYPMSPLLQQCIRGDTSSCARTLVSGTMGNKFILSKGNIVANCASILCKCYSTGTIINQSPDKLLTFIASDTCPLVEIDGVTIQVGGRQYPDMVYESKVALGPAISLERLDVGTNLGNALKKLDDAKILIDSSNQILETVRRSSFNFGSLLSVPILICIALVLLFLICCCKRRYLQTLKQHTKVDPTFKPDLTGTSKSYVRSL

SEQ ID NO: 163 - protein, 662 aa, Canine morbillivirus
MHNKIPKGSKTLTTTQQDFPKRHSIKSAETQTSQARHSITSAQRSTRHGPRTSDRPVHYIMNRTRSCKQASYRSDNIPAHGDHEGIIHHTPERVSQGMRFRFKRRQSSATSSGSQCTWLVLWCIGIASLFLCSKAQIHWNNLSTIGIIGTDSVHYKIMTRPSNQYLVIKLMPNVSLIDNCTKAELTEYEKLLSSVLEPINQALTLMTKNVKPLQSVGSGRRQRRFAGVVLAGAALGVATAAQITAGIALHQSNLNAQAIQSLRTSLEQSNKAIEEIREATQETIIAVQGVQDYVNNELIPAMQHMSCELVGQRLGLKLLRYYTELLSIFGPSLRDPISAEISIQALSYALGGEIHKILEKLGYSGNDMIAILESRGIKTKITHVDLPGKLIILSISYPTLSEVKGVIVHRLEAVSYNIGSQEWYTTVPRYVATNGYLISNFDESSCVFVSESAICSQNSLYPMSPLLQQCIRGDTSSCARTLVSGTMGNKFILSKGNIVANCASILCKCYSTGTIINQSPDKLLTFIASDTCPLVEIDGVTIQVGGRQYPDMVYESKVALGPAISLERLDVGTNLGNALKKLDDAKVLIDSSNQILETVRRSSFNFGSLLSVPILICTALVLLFLIYCCKRRYLQTLKQHTKVDPTFKPDLTGTSKSYVRSL

SEQ ID NO: 164 - protein, 662 aa, Canine morbillivirus
MHNKIPKGSKTLTPTQQDLPQRHSIKSAETQTSQARHSITSAHRSARHGPRTSDRPVHYIMNRTRPCKQAGYRSDNIPAHGDHEGIIHHTPERVSQGMRSRFKRRQSSATSSGSQCTWLVLWCIGIASLFLCSKAQIHWNNLSTIGIIGTDSVHYKIMTRPSRQYLVIKLMPNVSLIDNCTKAELGEYEKLLSSVLEPINQALTLMTKNVKPLQSVGSGRRQRRFAGVVLAGAALGVATAAQITAGIALHQSNLNAQAIQSLRTSLEQSNKAIEEIREATQETIIAVQGVQDYVNNELVPAMQQMSCELVGQRLGLKLLRYYTELLSIFGPSLRDPISAEISIQALSYALGGEIHKILEKLGYSGNDMIAILESRGIKTKITHVDLPGKLIILSISYPTLSEVKGVIVHRLEAVSYNIGSQEWYTTVPRYVATNGYLISNFDESSCVFVSESAICSQNSLYPMSPLLQQCIRGDTSSCARTLVSGTMGNKFILSKGNIVANCASILCKCYSTGTIINQSPDKLLTFIASDTCPLVEIDGVTIQVGGRQYPDIVYESKVALGPAISLERLDVGTNLGNALKKLDDAKILIDSSNQILETVRRSSFNFGSLLSVPILICTALVLLFLIYCCKRRYQQTLKQHTKIDPTFKPDLTGTSKSYVRSL

SEQ ID NO: 165 - protein, 662 aa, Canine morbillivirus
MHNKIPKRSKTQTHTQQDLPPQHSTELAETKTSRARHSTTSAQRSTHYGPLTSDRPIHYTMNRIRSRKQASHRSENIPVHGNHEGTIHHTPGSVSQGAGSRLKRRQSNAINSGSQCTWLVLWCLGIASLFLCSKAQIHWNNLSTIGIIGTDSVHYKIMARPSHQYLVIKLMPNVSLIENCTKAELGEYEKLLNSVLEPINQALTLMTKNVKPLQSLGSARRQRRFAGVVLAGVALGVATAAQITAGIALHQSNLNAQAIQSLRTSLEQSNKAIEEIREATQETIIAVQGVQDYVNNELIPAMQHMSCELVGQRLGLKLLRYYTELLSIFGPSLRDPISAEISIQALSYALGGEIHKILEKLGYSGNDMIAILESRGIKTKITHVDLPGKLIILSISYPTLSEVKGVIVHRLEAVSYNIGSQEWYTTVPRYVATNGYLISNFDESPCVFVSESAICSQNSLYPMSPLLQQCIRGDTSSCARTLVSGTMGNKFILSKGNIVASCASILCKCYSTGTIINQSPDKLLTFIASDTCPLVEIDGVTIQVGGRQYPDMVYESKVALGPAISLERLDVGTNLGNALKKLDDAKVLIDSSNQILETVRRSSFNFGSLLSVPILICTALALLFMIYCCKRRYQQTLKQNAKVDPTFKPDLTGTSKSYVRSL

SEQ ID NO: 166 - protein, 662 aa, Canine morbillivirus
MHNKIPKRSNTRTHTQQDLPPQPSTKSAETKTSQARHSITSARRSTHHDPLTSDRPIHYIMNRIRSCKQTSYRSDNIPAHGDHEGIIHHTPGSVPQGSGSQIKRRQSNAINSGSQCTWLVLWCIGVASLFLCSKAQIHWNNLSTIGIIGTDSVHYKIMARPSHQYLVIKLMPNVSLIENCTKAKLGEYEKLLNSVLEPINQALTLMTKNVKPLQSLGSGRRQRRFAGVVLAGAALGVATAAQITAGIALHQSNLNAQAIQSLRTSLEQSNKAIEEIREATQETVIAVQGVQDYVNNELVPAMQHMSCELVGQRLGLKLLRYYTELLSIFGPSLRDPISAEISIQALSYALGGEIHKILEKLGYSGSDMIAILESRGIKTKITHVDLPGKLIILSISYPTLSEVKGVIVHRLEAVSYNIGSQEWYTTVPRYVATNGYLISNFDESPCVFVSESAICSQNSLYPMSPLLQQCIRGDTSSCARTLVSGTMGNKFILSKGNIVANCASILCKCYSTGTIINQSPDKLLTFIASDTCPLVEIDGVTIQVGGRQYPDMVYESKVALGPAISLERLDVGTNLGNALKKLDDAKVLIDSSNQILETVRRSSFNFGSLLSVPILICTALALLLLIYCCKRRYQQTLKQNAKVDPAFKPDLTGTSKSYVRSL

SEQ ID NO: 167 - protein, 662 aa, Canine morbillivirus
MHNKIPKRSNTRKHTQQDLPPQHSTKSAETKTSQARHSTTSARRSTHHGPLTSDRPIHYIMNRIRSCKQASHRSDNIPAHGDHEGTIHHTPGSVSQGAGSRLKRRQSNATNSGSQCTWLVLWCIGIASLFLCSKAQIHWNNLSTIGIIGTDSVHYKIMTRPSHQYLVIKLMPNVSLIDNCTKAELGEYEKLLNSVLEPINQALTLMTKNVKPLQSVGSGRRQRRFAGVVLAGAALGVATAAQITAGIALHQSNLNAQAIQSLRTSLEQSNKAIEEIREATQETVIAVQGVQDYVNNELVPAMQHMSCELVGQRLGLKLLRYYTELLSIFGPSLRDPISAEISIQALSYVLGGEIHKILEKLGYSGNDMIAILESRGIKTKITHVDLPGKLIILSISYPTLSEVKGVIVHRLEAVSYNIGSQEWYTTVPRYVATNGYLISNFDESPCVFVSESAICSQNSLYPMSPLLQQCIRGDTSSCARTLVSGTMGNKFILSKGNIVANCASILCKCYSTGTIINQSPDKLLTFIASDTCPLVEIDGVTIQVGGRQYPDMVYESKVALGPAISLERLDVGTNLGNALKKLDDAKVLIDSSNQILETVRRSSFNFGSLLSVPILICTALALLLLIYCCKRRYQQTLKQNAKVDPTFKPDLTGTSKSYVRSL

SEQ ID NO: 168 - protein, 662 aa, Canine morbillivirus; identical to SEQ ID NO: 167

SEQ ID NO: 169 - protein, 662 aa, Canine morbillivirus
MHNKIPKRSNTRKHTQQDLPPQHSTKSAETKTSQARHSTTSARRSTHHGPLTSDRPIHYIMNRIRSCKQASHRSDNIPAHGDHEGTIHHTPGSVSQGAGSRLKRRQSNATNSGSQCTWLVLWCIGIASLFLCSKAQIHWNNLSTIGIIGTDSVHYKIMTRPSHQYLVIKLMPNVSLIDNCTKAELGEYEKLLNSVLEPINQALTLMTKNVKPLQSVGSGRRQRRFAGVVLAGAALGVATAAQITAGIALHQSNLNAQAIQSLRTSLEQSNKAIEEIREATQETVIAVQGVQDYVNNELVPAMQHMSCELVGQRLGLKLLRYYTELLSIFGPSLRDPISAEISIQALSYALGGEIHKILEKLGYSGNDMIAILESRGIKTKITHVDLPGKLIILSISYPTLSEVKGVIVHRLEAVSYNIGSQEWYTTVPRYVATNGYLISNFDESPCVFVSESAICSQNSLYPMSPLLQQCIRGDTSSCARTLVSGTMGNKFILSKGNIVANCASILCKCYSTGTIINQSPDKLLTFIASDTCPLVEIDGVTIQVGGRQYPDMVYESKVALGPAISLERLDVGTNLGNALKKLDDAKVLIDSSNQILETVRRSSFNFGSLLSVPILICTALALLLLIYCCKRRYQQTLKQNAKVDPTFKPDLTGTSKSYVRSL

SEQ ID NO: 170 - protein, 662 aa, Canine morbillivirus
MHNKIPKRSNTRKHTQQDLPPQHSTKSAETKTSQARHSTTSARRSTHHGPLTSDRPIHYIMNRIRSCKQASHRSDNIPAHGDHEGTIHHTPGSVSQGAGSRLKRRQSNATNSGSQCTWLVLWCIGIASLFLCSKAQIHWNNLSTIGIIGTDSVHYKIMTRPSHQYLVIKLMPNVSLIDNCTKAELGEYEKLLNSVLEPINQALTLMTKNVKPLQSVGSGRRQRRFAGVVLAGAALGVATAAQITAGIALHQSNLNAQAIQSLRTSLEQSNKAIEEIREATQETVIAVQGVQDYVNNELVPAMQHMSCELVGQRLGLKLLRYYTELLSIFGPSLRDPISAEISIQALSYALGGEIHKILEKLGYSGNDMIAILESRGIKTKITHVDLPGKLIILSISYPTLSEVKGVIVHRLEAVSYNIGSQEWYTAVPRYVATNGYLISNFDESSCVFVSESAICSQNSLYPMSPLLQQCIRGDTSSCARTLVSGTMGNKFILSKGNIVANCASILCKCYSTGTIINQSPDKLLTFIASDTCPLVEIDGVTIQVGGRQYPDMVYESKVALGPAISLERLDVGTNLGNALKKLDDAKVLIDSSNQILETVRRSSFNFGSLLSVPILICTALALLLLIYCCKRRYQQTLKQNTKVAPTFKPDLTGTSKSYVKSL

SEQ ID NO: 171 - protein, 662 aa, Canine morbillivirus
MHNKIPKRSKTRKHTQQDLPQQHSTKSAETKTSQARHSTTSAQRSAHHGSLTSDRPVHYIMNRVRSCKQAGHKSDNIPAHGDHEGTIHHTPGSVSQGAGSRLKRRQSNATNSGSQCTWLVLWCIGTTSLFLCSKAQIHWSNLSTIGIIGTDSVHYKIMTRPSHQYLVIKLMPNVSLIDNCTKAELGEYEKLLNSVLEPINQALTLMTKNVKPLQSVGSGRRQRRFAGVVLAGAALGVATAAQITAGIALHQSNLNAQAIQSLRSSLEQSNKAIEEIREATQETVIAVQGVQDYVNNELVPAMQHMSCELVGQKLGLKLLRYYTELLSIFGPSLRDPISAEISIQALSYALGGEIHKILEKLGYSGNDMIAILESRGIKTKITHVDLPGKLIILSISYPTLSEVKGVIVHRLEAVSYNIGSQEWYTTVPRYVATNGYLISNFDESPCVFVSESAICSQNSLYPMSPLLQQCIRGDTSSCARTLVSGTMGNKFILSKGNIVANCASILCKCYSTGTIINQSPDKLLTFIASDICPLVEIDGVTIQVGGRQYPDMVYESKVALGPAISLERLDVGTNLGNALKKLDDAKVLIDSSNQILDTVRRSSFNFGSLLSVPLLICTALALLLLIYCCKRRYQQTLKQNTKVDPTFKPDLTGTSKSYVRSL

SEQ ID NO: 172 - protein, 662 aa, Canine morbillivirus
MHNKIPKRSRTQTHTQQDLPPQHSTKSAETKTSQTRHSITPAQRSTHHGPRTSDRPVHYIMNRTRSCKQASYRSDNIPAHGDHEGIIHHTPESVSQGARSRFKRRQSNATNSGSQCTWLVLWCIGIASLFLCSKAQIHWNNLSTIGIIGTDSVHYKIMTRPSHQYLVIKLMPNVSLIDNCTKAELGEYEKLLNSVLEPINQALTLMTKNVKPLQSVGSGRRQRRFAGVVLAGAALGVATAAQITAGIALHQSNLNAQAIQSLRTSLEQSNKAIEEIREATQETIIAVQGVQDYVNNELVPAMQHMSCELVGQRLGLKLLRYYTELLSIFGPSLRDPISAEISIQALSYALGGEIHKILEKLGYSGNDMIAILESRGIKTKITHVDLPGKLIILSISYPTLSEVKGVIVHRLEAVSYNIGSQEWYTTVPRYVATNGYLISNFDESSCVFVSESAICSQNSLYPMSPLLQQCIRGDTSSCARTLVSGTMGNKFILSKGNIVANCASILCKCYSTSTIINQSPDKLLTFIASDTCPLVEIDGITVQVGGRQYPDMVYESKVALGPAISLERLDVGTNLGNALKKLDDAKVLIDSSNHILETVRRSSFNFGSLLSVPILICTALALLLLIYCCKRRYQQTLKQNTKVDPTFKPDLTGTSKSYVRSL

SEQ ID NO: 173 - protein, 662 aa, Canine morbillivirus
MHNKIPERSRIQTHTQQDLPQQYSTKSVETETSQARHSTTSAQRSMHHGPLTLERPVHYIMNRTRSRKQASYRSDNIPAHGDHEGIIHHKPESVSQGTRSQFKRRRSDATNSGSQCTWLVLWCIGIASLFICSKAQIHWNNLSTIGIIGTDSVHYKIMTRPSHQYLVIKLMPNVSLIDNCTKSELGEYEKLLNSVLEPINQALTLMTKNVKPLQSIGSGRRQRRFAGVVLAGAALGVATAAQITAGIALHQSNLNAQAIQSLRTSLEQSNKAIEEIREATQETVIAVQGVQDYVNNELVPAMQHMSCELVGQRLGLKLLRYYTELLSIFGPSLRDPISAEISIQALSYALGGEIHKILEKLGYSGNDMIAILESRGIKTKITHVDLPGKLIILSISYPTLSEVKGVIVHRLEAVSYNIGSQEWYTTVPRYVATNGYLISNFDESSCVFVSESAICSQNSLYPMSPLLQQCIRGDTSSCARTLVSGTMGNKFILSKGNIVANCASILCKCYSTSTIINQSPDKLLTFIASDTCPLVEIDGVTIQVGGRQYPDMVYESKVALGPAISLERLDVGTNLGNALKKLDDAKALIESSNQILETVRRSSLNFGSLLSVPILICTALALLLLIYCCKRRYQQTLKQNTKVDPTFKPDLTGTSKSYVRSL

SEQ ID NO: 174 - protein, 662 aa, Canine morbillivirus
MHNKIPERSRIQTHTQQDLPQQYSTKSVETETSQARHSTTSAQRSMHHGPLTLDRPVHYIMNRTRSRKQASYRSDNIPAHGDHEGIIHHKPESVSQGTRSQFKRRRSDATNSGSQCTWLVLWCIGIASLFICSKAQIHWNNLSTIGIIGTDSVHYKIMTRPSHQYLVIKLMPNVSLIDNCTKSELGEYEKLLNSVLEPINQALTLMTKNVKPLQSIGSGRRQRRFAGVVLAGAALGVATAAQITAGIALHQSNLNAQAIQSLRTSLEQSNKAIEEIREATQETVIAVQGVQDYVNNELVPAMQHMSCELVGQRLGLKLLRYYTELLSIFGPSLRDPISAEISIQALSYALGGEIHKILEKLGYSGNDMIAILESQGIKTKITHVDLPGKLIILSISYPTLSEVKGVIVHRLEAVSYNIGSQEWYTTVPRYVATNGYLISNFDESSCVFVSESAICSQNSLYPMSPLLQQCIRGDTSSCARTLVSGTMGNKFILSKGNIVANCASILCKCYSTSTIINQSPDKLLTFIASDTCPLVEIDGVTIQVGGRQYPDMVYESKVALGPAISLERLDVGTNLGNALKKLDDAKALIESSNQILETVRRSSLNFGSLLSVPILICTALALLLLIYCCKRRYQQTLKQNTKVDPTFKPDLTGTSKSYVRSL

SEQ ID NO: 175 - protein, 662 aa, Canine morbillivirus; identical to SEQ ID NO: 174

SEQ ID NO: 176 - protein, 662 aa, Canine morbillivirus
MHNKIPERSRIQTHTQQDLPQQHSTKSVETDTSQARHSTTSAQRSMHHGPLTLDRPVHYIMSRTRSRKQASDRSHNIPAHGDHKGIIHHKPESVSQGAGSQFKKRRYDTTNSGSQCTWLVLWCIGIASLFICSKAQIHWNNLSTIGIIGTDSVHYKIMTRPSHQYLVIKLMPNVSLIDNCTKSELGEYEKLLNSVLEPINQALTLMTKNVKPLQSIGSGRRQRRFAGVVLAGAALGVATAAQITAGIALHQSNLNAQAIQSLRTSLEQSNKAIEEIREATQETVIAVQGVQDYVNNELIPAMQHMSCELVGQRLGLKLLRYYTELLSIFGPSLRDPISAEISIQALSYALGGEIHKILEKLGYSGNDMIAILESRGIKTKITHVDLPGKLIILSISYPTLSEVKGVIVHRLEAVSYNIGSQEWYTTVPRYVATNGYLISNFDESSCVFVSESAICSQNSLYPMSPLLQQCIRGDTSSCARTLVSGTMGNKFILSKGNIVANCASILCKCYSTSTIINQSPDKLLTFIASDTCPLVEIDGVTIQVGGRQYPDMVYESKVALGPAISLERLDVGTNLGNALKKLDDAKVLIESSNQILETVRRPSLSFSSLLSVPILICTALALLLLIYCCKRRYQQTLKQNTKVDLTFKPDLTGTSKSYVRSL

SEQ ID NO: 177 - protein, 662 aa, Canine morbillivirus
MHNKIPERSRIQTHTQQDLPQQHSTKSVETDTSQARHSTTSAQRSMHHGPLTLDRPVHYIMSRTRSRKQASYRSHNIPAHGDHKGIIHHKPESVSQGAGSQFKKRRYDTTNSGSQCTWLVLWCIGIASLFICSKAQIHWNNLSTIGIIGTDSVHYKIMTRPSHQYLVIKLMPNVSLIDNCTKSELGEYEKLLNSVLEPINQALTLMTKNVKPLQSIGSGRRQRRFAGVVLAGAALGVATAAQITAGIALHQSNLNAQAIQSLRTSLEQSNKAIEEIREATQETVIAVQGVQDYVNNELVPAMQHMSCELVGQRLGLKLLRYYTELLSIFGPSLRDPISAEISIQALSYALGGEIHKILEKLGYSGNDMIAILESRGIKTKITHVDLPGKLIILSISYPTLSEVKGVIVHRLEAVSYNIGSQEWYTTVPRYVATNGYLISNFDESSCVFVSESAICSQNSLYPMSPLLQQCIRGDTSSCARTLVSGTMGNKFILSKGNIVANCASILCKCYSTSTIINQSPDKLLTFIASDTCPLVEIDGVTIQVGGRQYPDMVYESKVALGPAISLERLDVGTNLGNALKKLDDAKVLIESSNQILETVRRPSLSFSSLLSVPILICTALALLLLIYCCKRRYQQTLKQNTKVDLTFKPDLTGTSKSYVRSL

SEQ ID NO: 178 - protein, 662 aa, Canine morbillivirus
MHEKIPKRSKTQTHTQQDLPQQHSTKSAESKTSRARHSITSAQRSTHYDPRTADWPDYYIMKRTRSCKQASYRSDNIPAHGDHDGIIHHTPESVSQGAKSRLKMGQSNAVKSGSQCTWLVLWCIGVASLFLCSKAQIHWNNLSTIGIIGTDSVHYKIMTRPSHQYLVIKLMPNVSLIDNCTKAELDEYEKLLSSILEPINQALTLMTKNVKPLQSVGSGRRQRRFAGVVLAGAALGVATAAQITAGIALHQSNLNAQAIQSLRTSLEQSNKAIEEIREATQETVIAVQGVQDYVNNELVPAMQHMSCELVGQRLGLKLLRYYTELLSIFGPSLRDPISAEISIQALSYALGGEIHKILEKLGYSGNDMIAILESRGIKTKITHVDLPGKFIILSVSYPTLSEVKGVIVHRLEAVSYNIGSQEWYTTVPRYVATNGYLISNFDESSCVFVSESAICSQNSLYPMSPLLQQCIRGDTSSCARTLVSGTMGNKFILSKGNIVANCASILCKCYSTSTIINQSPDKLLTFIASDTCPLVEIDGVTIQVGGRQYPDMVYESKVALGPAISLERLDVGTNLGNALKKLDDAKVLIDSSNQILETVRRSSFNFGSLLSVPILSCTALALLLLICCCKRRYQQTHKQNTKVDPTFKPDLTGTSRSYVRSL

SEQ ID NO: 179 - protein, 662 aa, Canine morbillivirus; identical to SEQ ID NO: 178

SEQ ID NO: 180 - protein, 662 aa, Canine morbillivirus
MHEKIPKRSKTQTHTQQDLPQQHSTKSAESKTSRARHSITSAQRSTHYDPRTADWPDYYIMKRTRSCKQASYRSDNIPAHGDHDGIIHHTPESVSQGAKSRLKMGQSNAVKSGSQCTWLVLWCIGVASLFLCSKAQIHWNNLSTIGIIGTDSVHYKIMTRPSHQYLVIKLMPNVSLIDNCTKAELDEYEKLLSSILEPINQALTLMTKNVKPLQSVGSGRRQRRFAGVVLAGAALGVATAAQITAGIALHQSNLNAQAIQSLRTSLEQSNKAIEEIREATQETVIAVQGVQDYVNNELVPAMQHMSCELVGQRLGLKLLRYYTELLSIFGPSLRDPISAEISIQALSYALGGEIHKILEKLGYSGNDMIAILESRGIKTKITHVDLPGKFIILSVSYPTLSEVKGVIVHRLEAVSYNIGSQEWYTTVPRYVATNGYLISNFDESSCVFVSESAICSQNSLYPMSPLLQQCIRGDTSSCARTLVSGTMGNKFILSKGNIVANCASILCKCYSTSTIINQSPDKLLTFIASDTCPLVEIDGVTIQVGSRQYPDMVYESKVALGPAISLERLDVGTNLGNALKKLDDAKVLIDSSNQILETVRRSSFNFGSLLSVPILSCTALALLLLICCCKRRYQQTHKQNTKVDPTFKPDLTGTSRSYVRSL

SEQ ID NO: 181 - protein, 662 aa, Canine morbillivirus
MHEKIPKRSKTQTHTQQDLPQQHSTKSAESKTSRARHSITSAQRSTHYDPRTADWPDYYIMKRTRSCKQASYRSDNIPAHGDHDGIIHHTPESVSQGAKSRLKMGQSNAVKSGSQYTWLVLWCIGVASLFLCSKAQIHWNNLSTIGIIGTDSVHYKIMTRPSHQYLVIKLMPNVSLIDNCTKAELDEYEKLLSSILEPINQALTLMTKNVKPLQSVGSGRRQRRFAGVVLAGAALGVATAAQITAGIALHQSNLNAQAIQSLRTSLEQSNKAIEEIREATQETVIAVQGVQDYVNNELVPAMQHMSCELVGQRLGLKLLRYYTELLSIFGPSLRDPISAEISIQALSYALGGEIHKILEKLGYSGNDMIAILESRGIKTKITHVDLPGKFIILSVSYPTLSEVKGVIVHRLEAVSYNIGSQEWYTTVPRYVATNGYLISNFDESSCVFVSESAICSQNSLYPMSPLLQQCIRGDTSSCARTLVSGTMGNKFILSKGNIVANCASILCKCYSTSTIINQSPDKLLTFIASDTCPLVEIDGVTIQVGGRQYPDMVYESKVALGPAISLERLDVGTNLGNALKKLDDAKVLIDSSNQILETVRRSSFNFGSLLSVPILSCTALALLLLICCCKRRYQQTHKQNTKVDPTFKPDLTGASRSYVRSL

SEQ ID NO: 182 - protein, 662 aa, Canine morbillivirus
MHKKIPKRSKTQTHTQQDLPQQHSTKSAESKTSRARHSITSAQRSTHYDPRTADWPDYYIMKRTRSCKQASYRSDNIPAHGDHDGIIHHTPESVSQGAKSRLKMGQSNAVKSGSQCTWLVLWCIGVASLFLCSKAQIHWNNLSTIGIIGTDSVHYKIMTRPSHQYLVIKLMPNVSLIDNCTKAELDEYEKLLNSVLEPINQALTLMTKNVKPLQSVGSGRRQRRFAGVVLAGAALGVATAAQITAGIALHQSNLNAQAIQSLRTSLEQSNKAIEEIREATQETVIAVQGVQDYVNNELVPAMQHMSCELVGQRLGLKLLRYYTELLSIFGPSLRDPISAEISIQALSYALGGEIHKILEKLGYSGNDMIAILESRGIKTKITHVDLPGKFIILSVSYPTLSEVKGVIVHRLEAVSYNIGSQEWYTTVPRYVATNGYLISNFDESSCVFVSESAICSQNSLYPMSPLLQQCIRGDTSSCARTLVSGTMGNKFILSKGNIVANCASILCKCYSTSTIINQSPDKLLTFIASDTCPLVEIDGVTIQVGGRQYPDMVYESKVALGPAISLERLDVGTNLGNALKKLDDAKVLIDSSNQILETVRRSSFNFGSLLSVPILSCTALALLLLICCCKRRYQQTLKQNTKVDPTFKPDLTGTSKSYVRSL

SEQ ID NO: 183 - protein, 662 aa, Canine morbillivirus
MHKEIPERSRTQTHTQQDLPQQKSTEYTEIKTSRARHGITPAQRSTHYGPRTLDRLVCYIMNRAMSCKQASYRSDNIPAHGDHEGVVHHTLESVSQGARSQLKRRPSNAINSGFQYIWLVLWCIGIASLFLCSKAQIHWNNLSTIGIIGTDSVHYKIMTRPSHQYLVIKLMPNVSLIDNCTKAELGEYEKLLNSVLEPINQALTLMTKNVKPLQSVGSGRRQRRFAGVVLAGAALGVATAAQITAGIALHQSNLNAQAIQSLRTSLEQSNKAIEEIREATQETVIAVQGVQDYVNNELVPAVQHMSCELVGQRLGLKLLRYYTELLSIFGPSLRDPISAEISIQALSYALGGEIHKILEKLGYSGNDMIAILESRGIKTRITHVDLPGKFIILSISYPTLSEVKGVIVHRLEAVSYNIGSQEWYTTVPRYVATNGYLISNFDESSCVFVSESAICSQNSLYPMSPLLQQCIRGDTSSCARTLVSGTMGNKFILSKGNIVANCASILCKCYSTSTIINQSPDKLLTFIASDTCPLVEIDGVTIQVGGRQYPDMVYESKVALGPAISLERLDVGTNLGNALKKLDDAKVLIDSSNQILETVRRSSFNFGSLLSVPILSCAVLALLLLIYCCKRRYQQTLKRNTKVDPTFKPDLTGTAKSYVRSL

SEQ ID NO: 184 - protein, 662 aa, Canine morbillivirus
MHKEIPERSRTQTHTQQDLPQQKSTEYTEIKTSRARHGITPAQRSTHYGPRTLDRLVCYIMNRAMSCKQASYRSDNIPAHGDHEGVVHHTLESVSQGARSQLKRRPSNAINSGFQYIWLVLWCIGIASLFLCSKAQIHWNNLSTIGIIGTDSVHYKIMTRPSHQYLVIKLMPNVSLIDNCTKAELGEYEKLLNSVLEPINQALTLMTKNVKPLQSVGSGRRQRRFAGVVLAGAALGVATAAQITAGIALHQSNLNAQAIQSLRTSLEQSNKAIEEIREATQETVIAVQGVQDYVNNELVPAIQHMSCELVGQRLGLKLLRYYTELLSIFGPSLRDPISAEISIQALSYALGGEIHKILEKLGYSGNDMIAILESRGIKTRITHVDLPGKFIILSISYPTLSEVKGVIVHRLEAVSYNIGSQEWYTTVPRYVATNGYLISNFDESSCVFVSESAICSQNSLYPMSPLLQQCIRGDTSSCARTLVSGTMGNKFILSKGNIVANCASILCKCYSTSTIINQSPDKLLTFIASDTCPLVEIDGVTIQVGGRQYPDMVYESKVALGPAISLERLDVGTNLGNALKKLDDAKVLIDSSNQILETVRRSSFNFGSLLSVPILSCAVLALLLLIYCCKRRYQQTLKRNTKVDPTFKPDLTGTSKSYVRSL

SEQ ID NO: 185 - protein, 662 aa, Canine morbillivirus; identical to SEQ ID NO: 4

SEQ ID NO: 186 - protein, 659 aa, Canine morbillivirus
MHKKIPERSRTYTHTQQDLPQQDNTKYTEIKTSRARHGITSAQRSTHYGPRTLDRLVYYIMNRSMSCKQASYRSDNILAHGDHEGVVHHTPKSVSQGARSQLKRRQSNAINSGFQYVWLVLWCIGIASLFLCSKAQIHWNNLSTIGIIGTDSVHYKIMTRPSHQYLVIKLMPNVSLIDNCTKAELGEYEKLLNSVLEPTNQALTLMTKNVKPLQSVGSSRRQRRFAGVVLAGAALGVATAAQITAGIALHQSNLNAQAIQSLRTSLEQSNKAIEEIREATQETVIAVQGVQDYVDNELVPAMQHMSCELVGQRLGLKLLRYYTELLSIFGPSLRDPISAEISIQALSYALGGEIHKILEKLGYSGNDMIAILESRGIKTRITHVDLPGKFIILSISYPTLSEVKGVIVHRLEAVSYNIGSQEWYTTVPRYVATNGYLISNFDESSCVFVSESAICSQNSLYPMSPLLQQCIRGDTSSCARTLVSGTMGNKFILSKGNIVANCASILCKCYSTSTIINQSPDKLIASDTCPLVEIDGVTIQVGGRQYPDLVYESKVALGPAISLERLDVGTNLGNALKKLDDAKVLIDSSNQILETVRRSSFNFGSLLSVPILSCAVLALLLLIYCCKRRYQQTLKQNTKVDPTFKPDLTGTSKSYVRSL

SEQ ID NO: 187 - protein, 662 aa, Canine morbillivirus
MHKKIPERSKTQTHTQQDLPRQYSTKYTEIKISRARHGITSAQRSTHYGPRTSDRLVHYIMNRTISCKQASHRSDNIPAHGDHEGVVHHTPESVPQGSGSQLKRRQSNAFNSGSQYIWLVLWCIGIASLFLCSKAQIHWNNLSTIGIIGTDSVHYKIMTRPSHQYLVIKLMPNVSLIDNCTKAELGEYEKLLNSVLEPINQALTLMTKNVKPLQSVGSGRRQRRFAGVVLAGAALGVATAAQITAGIALHQSNLNAQAIQSLRTSLEQSNKAIEEIREATQETVIAVQGVQDYVNNELVPAMQHMSCELVGQRLGLKLLRYYTELLSIFGPSLRDPISAEISIQALSYALGGEIHKILEKLGYSGNDMIAILESRGIKTRITHVDLPGKFIILSISYPTLSEVKGVIVHRLEAVSYNIGSQEWYTTVPRYVATNGYLISNFDESSCVFVSESAICSQNSLYPMSPLLQQCIRGDTSSCARTLVSGTMGNKFILSKGNIVANCASILCKCYSTSTIINQSPDKLLTFIASDTCPLVEIDGVTIQVGGRQYPDMVYESKVALGPAISLERLDVGTNLGNALKKLDDAKVLIDSSNQILETVRRSSFNFGSLLSVPILSCTVLALLLLIYCCKRRYQQTLKQNTKVDPTFKPDLTGTSKSYVRSL

SEQ ID NO: 188 - protein, 662 aa, Canine morbillivirus
MHNKIPKRSRTRTHTRQDLSPQHSTKSIGTKTSRARHSITSVLQSTHLGPQTSDRPVHYIKNRTRSCKQASYRSGNISAHRDHDGIVHHAPESVSQEARSLFKRRQSNATDSGFQCTWLILWCIGIASLFLCSKAQIHWNNLSTIGIIGTDSVHYKIMTRPSHQYLVIKLMPNVSLIDNCTRTELGEYEKLLNSVLEPINQALNLMTKNVKPLQSIGSGRRQRRFAGVVLAGAALGVATAAQITAGIALHQSNLNAQAIQSLRTSLEQSNKAIEEIREATQETVIAVQGIQDYVNNELVPAMQHMSCELVGQRLGLKLLRYYTELLSIFGPSLRDPISAEISIQALSYALGGEIHKILEKLGYSGNDMIAILESRGIKTKITHVDLPGKLIILSISYPTLSEVKGVIVHRLEAVSYNIGSQEWYTTVPRYVATNGYLISNFDESSCVFVSESAICSQNSLYPMSPLLQQCIRGDTSSCARTLVSGTMGNKFILSKGNIVANCASILCKCYSTSTIINQSPDKLLTFIASDTCPLVEIDGVTIQVGGRQYPDMVYESKVALGPAISLERLDVGTNLGNALKKLDDAKVLIDSSNQILETVRRSSFNFGSLLSVPILICTALALLLLICCCKRRYQQTLKQNTKVDPTFKPDLTGASKSYVRSL

SEQ ID NO: 189 - protein, 662 aa, Canine morbillivirus
MHNKIPKRSRTRTHTRQDLSPQHSTKSIGTKTSRARHSITSVLQSTHLGPQTSDRPVHYIKNRTRSCKQASYRSGNISAHRDHDGIVHHAPESVSQEARSLFKRRQSNATDSGFQCTWLILWCIGIASLFLCSKAQIHWNNLSTIGIIGTDSVHYKIMTRPSHQYLVIKLMPNVSLIDNCTRTELGEYEKLLNSVLEPINQALNLMTKNVKPLQSIGSGRRQRRFAGVVLAGAALGVATAAQITAGIALHQSNLNAQAIQSLRTSLEQSNKAIEEIREATQETVIAVQGIQDYVNNELVPAMQHMSCELVGQRLGLKLLRYYTELLSIFGPSLRDPISAEISIQALSYALGGEIHKILEKLGYSGNDMIAILESRGIKTKITHVDLPGKLIILSISYPTLSEVKGVIVHRLEAVSYNIGSQEWYTTVPRYVATNGYLISNFDESSCVFVSESAICSQNSLYPMSPLLQQCIRGDTSSCARTLVSGTMGNKFILSKGNIVANCASILCKCYSTSTIINQSPDKLLTFIASDTCPLVEIDGVTIQVGGRQYPDMVYESKVALGPAISLERLDVGTNLGNALKKLDDAKVLIDSSNQILETVRRSSFNFGSLLSVPILICTALALLLLICCCKRRYQQTLKQNTKVDPTFKPDLTGTSKSYVRSL

SEQ ID NO: 190 - protein, 662 aa, Canine morbillivirus; identical to SEQ ID NO: 189

SEQ ID NO: 191 - protein, 662 aa, Canine morbillivirus
MHNKIPKRSRTRTHTRQGLSPQHSTKSIGTKTSRARHSITSALQSTHLGPQTSDRPVHYIKNRTRSCKQASYRSGNISAHRDHDGIIHHAPESVSQEARSLSKRRQSNATDSGFQCTWLILWCIGIASLFLCSKAQIHWNNLSTIGIIGTDSVHYKIMTRPSHQYLVIKLMPNVSLIDNCTRTELGEYEKLLNSVLEPINQALNLMTKNVKPLQSVGSGRRQRRFAGVVLAGAALGVATAAQITAGIALHQSNLNAQAIQSLRTSLEQSNKAIEEIREATQETVIAVQGVQDYVNNELVPAMQHMSCELVGQRLGLKLLRYYTELLSIFGPSLRDPISAEISIQALSYALGGEIHKILEKLGYSGNDMIAILESRGIKTKITHVDLPGKLIILSISYPTLSEVKGVIVHRLEAVSYNIGSQEWYTTVPRYVATNGYLISNFDESSCVFVSESAICSQNSLYPMSPLLQQCIRGDTSSCARTLVSGTMGNKFILSKGNIVANCASILCKCYSTSTIINQSPDKLLTFIASDTCPLVEIDGVTIQVGGRQYPDMVYESKVALGPAISLERLDVGTNLGNALKKLDDAKVLIDSSNQILETVRRSSFNFGSLLSVPILICTALALLLLICCCKRRYQQTLKQNTKVDPTFKPDLTGTSKSYVRSL

SEQ ID NO: 192 - protein, 662 aa, Canine morbillivirus
MHNKIPKRSRTRTHTRQDLSPQHSTESIGTKTSRGRHIITSALQSTHLGPQTSDRPVHYIKNRTRSCKQASYRSGNISAHRDHDGIIHHAPESVSQEARSLFKRRQSNATDSGFQCTWLILWCIGIASLFLCSKAQIHWNNLSTIGIIGTDSVHYKIMTRPSHQYLVIKLMPNVSLIDNCTRTELGEYEKLLNSVLEPINQALNLMTKNVKPLQSIGSGRRQRRFAGVVLAGAALGVATAAQITAGIALHQSNLNAQAIQSLRTSLEQSNKAIEEIREATQETVIAVQGVQDYVNNELLPAMQHMSCELVGQRLGLKLLRYYTELLSIFGPSLRDPISAEISIQALSYVLGGEIHKILEKLGYSGNDMIAILESRGIKTKITHVDLPGKLIILSISYPTLSEVKGVIVHRLEAVSYNIGSQEWYTTVPRYVATNGYLISNFDESSCVFVSESAICSQNSLYPMSPLLQQCIRGDTSSCARTLVSGTMGNKFILSKGNIVANCASILCKCYSTSTIINQSPDKLLTFIASDTCPLVEIDGVTIQVGGRQYPDMVYESKVALGPAISLERLDVGTNLGNALKKLDDAKVLIDSSNQILETVRRSSFNFGSLLSVPILICTALALLLLICCCKRRYQQTLKQNTKVDPTFKPDLTGTSKSYVRSL

SEQ ID NO: 193 - protein, 662 aa, Canine morbillivirus
MHNKILEGSKTQMHTQQNPPSQHSTKSSGTKTSQTRHSTTSAQRSTHHGPRTADRPVHYTMDRTRSCKQAGHRSDSIPVRGDHEGIIHHTLEGISQGARSRFKRRQSTATSPGPQCTWLVLWCIGIASLFLCSEAQIHWNNLSTIGIIGTDSVHYKIMTRPSHQYLVIKLMPNVSLIDNCTKAELGEYEKLLNSVLEPINQALTLMTKNVKPLQSVGSGRRQRRFAGVVLAGAALGVATAAQITAGIALHQSNLNAQAIQSLRTSLEQSNKAIEEIREATQETVIAVQGVQDYVNNELVPAMQHMSCELVGQRLGLKLLRYYTELLSIFGPSLRDPISAEISIQALSYALGGEIHKILEKLGYSGNDMIAILESRGIKTKITHVDLPGKLIILSISYPTLSEVKGVIVHRLEAVSYNIGSQEWYTTVPRYVATNGYLISNFDESSCVFVSESAICSQNSLYPMSPLLQQCIRGDTSSCARTLVSGTMGNKFILSKGNIVANCASILCKCYSTSTIINQSSDKLLTFIASDTCPLVEIDGVTIQVGGRQYPDMVYESRVALGPAISLERLDVGTNLGNALKKLDDAKVLIDSSNQILETVRRSSLNFGSLLSVPILICTALALLLLIYCCKRRYQQTLRQNPKVDPTFKPDLTGTSKSYVRSL

SEQ ID NO: 194 - protein, 662 aa, Canine morbillivirus
MHNKILEGSKTQMHTQQNPPSQHSTKSSGTKTSQTRHSTTSAQRSTHHGPRTSDRPVHYTMDRTRSCKQAGHRSDSIPVRGDHEGIIHHTLESISQGARSRFKRRQSTATSPGPQCTWLVLWCIGIASLFLCSEAQIHWNNLSTIGIIGTDSVHYKIMTRPSHQYLVIKLMPNASLIDNCTKAELGEYEKLLNSILEPINQALTLMTKNVKPLQSVGSGRRQRRFAGVVLAGAALGVATAAQITAGIALHQSNLNAQAIQSLRTSLEQSNKAIEEIREATQETVIAVQGVQDYVNNELVPAMQHMSCELVGQRLGLKLLRYYTELLSIFGPSLRDPISAEISIQALSYALGGEIHKILEKLGYSGNDMIAILESRGIKTKITHVDLPGKLIILSISYPTLSEVKGVIVHRLEAVSYNIGSQEWYTTVPRYVATNGYLISNFDESSCVFVSESAICSQNSLYPMSPLLQQCIRGDTSSCARTLVSGTMGNKFILSKGNIVANCASILCKCYSTSTIINQSPDKLLTFIASDTCPLVEIDGVTIQVGGRQYPDMVYESRVALGPAISLERLDVGTNLGNALKKLDDAKVLIDSSNQILETVRRSSLNFGSLLSVPILICTALPLLLLIYCCKRRYQQTLRQNPKVDPTFKPDLTGTSKSYVRSL

SEQ ID NO: 195 - protein, 662 aa, Canine morbillivirus
MHNKIPKKSKPLPHTRQDPLQQHSTRSTETKTSQGRYSITSAQRSTYYSPQALDRSIHYIMNRTRSCKQTSHRSNNIPPHRDHEGIIHHTPESVTQGASSWFKRWQSNATNAGSQCTWLVLWCIGIASLFLCSKAQIHWNNLSTIGIIGTDSVHYKIMTRPSHQYLVIKLMPNVSLIDNCTKAELGEYEKLLNSVLEPINQALTLMTNNVKPLQSVGSGRRQRRFAGVVLAGAALGVATAAQITAGIALHQSNLNAQAIQSLRASLEQSNKAIEEIREATQETVIAVQGVQDYVNNELVPAMQHMSCELVGQRLGLKLLRYYTELLSIFGPSLRDPISAEISIQALSYALGGEIHKILEKLGYSGNDMIAILESRGIKTKITHVDLPGKLIILSISYPTLSEVKGVIVHRLEAVSYNIGSQEWYTTVPKYVATNGYLISNFDESSCVFVSESAICSQNSLYPMSPILQQCIRGDTSSCARTLVSGTMGNKFILSKGNIVANCASILCKCYSTSTIINQSPDKLLTFIASDTCPLVEIDGVTIQVGGRQYPDMVYESKVALGPAISLERLDVGTNLGNALKKLDDAKVLIDSSNQILETVKRSSFNFGSLLSVPILICTALALLLLIYCCKRRYRQTFKHNTKVDPTFKPDLTGTSKSYVRSL

SEQ ID NO: 196 - protein, 662 aa, Canine morbillivirus
MHNKIPKKSKPLPHTRQDPLQQHSTRSTETKTSQGRYSITSAQRSTYYSPQTLDRSVHYIMNRTRSCKQTSHRSNNIPPHRDHEGIIHYTPESVTQGASSWFKRWQSNATNAGSQCTWLVLWCIGIASLFLCSKAQIHWNNLSTIGIIGTDSVHYKIMTRPSHQYLVIKLMPNVSLIDNCTKAELGEYEKLLNSVLEPINQALTLMTNNVKPLQSVGSGRRQRRFAGVVLAGAALGVATAAQITAGIALHQSNLNAQAIQSLRASLEQSNKAIEEIREATQETVIAVQGVQDYVNNELVPAMQHMSCELVGQRLGLKLLRYYTELLSIFGPSLRDPISAEISIQALSYALGGEIHKILEKLGYSGNDMIAILESRGIKTKITHVDLPGKLIILSISYPTLSEVKGVIVHRLEAVSYNIGSQEWYTTVPKYVATNGYLISNFDESSCVFVSESAICSQNSLYPMSPILQQCIRGDTSSCARTLVSGTMGNKFILSKGNIVANCASILCKCYSTSTIINQSPDKLLTFIASDTCPLVEIDGVTIQVGGRQYPDMVYESKVALGPAISLERLDVGTNLGNALKKLDDAKVLIDSSNQILETVKRSSFNFGSLLSVPILICTALALLLLIYCCKRRYRQTFKHNTKVDPTFKPDLTGTSKSYVRSL

SEQ ID NO: 197 - protein, 661 aa, Canine morbillivirus
MHNKIPKKSKPLPHTRQDPLQQHSTRSAETKTSQGRYSITSARSTYHGPRTSDRSVHYIMNRTRSCKQTSHRSDNIPPHRDHEGIIHHTPESVTQGASSWFKRRQSNATNAGSQCTWLVLWCIGIASLFLCSKAQIHWNNLSTIGIIGTDSVHYKIMTRPSHQYLVIKLMPNVSLIDNCTKAELGEYEKLLNSVLEPINQALTLMTNNVKPLQSVGSGRRQRRFAGVVLAGAALGVATAAQITAGIALHQSNLNAQAIQSLRTSLEQSNKAIEEIREATQETVIAVQGVQDYVNNELVPAMQHMSCELVGQRLGLKLLRYYTELLSIFGPSLRDPISAEISIQALSYALGGEIHKILEKLGYSGNDMIAILESRGIKTKITHVDLPGKLIILSISYPTLSEVKGVIVHRLEAVSYNIGSQEWYTTVPKYVATNGYLISNFDESSCVFVSESAICSQNSLYPMSPILQQCIRGDTSSCARTLVSGTMGNKFILSKGNIVANCASILCKCYSTSTIINQSPDKLLTFIASDTCPLVEIDGVTIQVGGRQYPDMVYESKVALGPAISLERLDVGTNLGNALKKLDDAKVLIDSSNQILETVKRSSFNFGSLLSVPILICTALALLLLIYCCKRRYRQTFKHNTKVDPTFKPDLTGTSKSYVRSL

SEQ ID NO: 198 - protein, 662 aa, Canine morbillivirus
MHNKIPKKSKPLPHTRQDPLQQHSTKSAETKTSQGRYSITSAQRSTYHGPRTSDRSVHYIMNRTRSCKQTSHRSDNIPPHRDHEGIIHHTPESVTQGASSWFKRRQSNATNAGSQCTWLVLWCIGIASLFLCSKAQIHWNNLSTIGIIGTDSVHYKIMTRPSHQYLVIKLMPNVSLIDNCTKAELGEYEKLLNSVLEPINQALTLMTNNVKPLQSVGSGRRQRRFAGVVLAGAALGVATAAQITAGIALHQSNLNAQAIQSLRTSLEQSNKAIEEIREATQETVIAVQGVQDYVNNELVPAMQHMSCELVGQRLGLKLLRYYTELLSIFGPSLRDPISAEISIQALSYALGGEIHKILEKLGYSGNDMIAILESRGIKTKITHVDLPGKLIILSISYPTLSEVKGVIVHRLEAVSYNIGSQEWYTTVPKYVATNGYLISNFDESSCVFVSESAICSQNSLYPMSPILQQCIRGDTSSCARTLVSGTMGNKFILSKGNIVANCASILCKCYSTSTIINQSPDKLLTFIASDTCPLVEIDGVTIQVGGRQYPDMVYESKVALGPAISLERLDVGTNLGNALKKLDDAKVLIDSSNQILETVKRSSFNFGSLLSVPILICTALALLLLIYCCKRRYRQTFKHNTKVDPTFKPDLTGTSKSYVRSL

SEQ ID NO: 199 - protein, 662 aa, Canine morbillivirus
MHNKIPKKSKPLPHTRQDPLQQHSTKSAETKTSQGRYSITSAQRSTYHGPRTSDRSVHYIMNRTRSCKQTSHRSDNIPPHRDHEGIIHHTPESVTQGASSWFKRRQSNATNAGSQCTWLVLWCIGIASLFLCSKAQIHWNNLSTIGIIGTDSVHYKIMTRPSHQYLVIKLMPNVSLIDNCTKAELGEYEKLLNSVLEPINQALTLMTNNVKPLQSVGSGRRQRRFAGVVLAGAALGVATAAQITAGIALHQSNLNAQAIQSLRTSLEQSNKAIEEIREATQETVIAVQGVQDYVNNELVPAMQHMSCELVGQRLGLKLLRYYTELLSIFGPSLRDPISAEISIQALSYALGGEIHKILEKLGYSGNDMIAILESRGIKTKITHVDLPGKLIILSISYPTLSEVKGVIVHRLEAVSYNIGSQEWYTTVPKYVATNGYLISNFDESSCVFVSESAICSQNSLYPMSPILQQCIRGDTSSCARTLVSGTMGNKFILSKGNIVANCASILCKCYSTSTIINQSPDKLLTFIASDTCPLVEIDGVTIQVGGRQYPDMVYESKVALGPAISLERLDVGTNLGNALKKLDDAKVLIDSSNQILETVKRSSFNFSSLLSVPILICTALALLLLIYCCKRRYRQTFKHNTKVDPTFKPDLTGTSKSYVRSL

SEQ ID NO: 200 - protein, 662 aa, Canine morbillivirus
MHNKIPKKSKPLPHTRQDPLQQHSTRSTETKTSQGRYSITSAQRSTYHSPRTSDRPVHYIMNRTRSCKQTSHRSDNIPPHRDHEGIIHHTPESVTQGASSWFKRWQSNATNAGSQCTWLVLWCIGIASLFLCSKAQIHWNNLSTIGIIGTDSVHYKIMTRPSHQYLVIKLMPNVSLIDNCTKAELGEYEKLLNSVLEPINQALTLMTNNVKPLQSVGSGRRQRRFAGVVLAGAALGVATAAQITAGIALHQSNLNAQAIQSLRTSLEQSNKAIEEIREATQETVIAVQGVQDYVNNELVPAMQHMSCELVGQRLGLKLLRYYTELLSIFGPSLRDPISAEISIQALSYALGGEIHKILEKLGYSGNDMIAILESRGIKTKITHVDLPGKLIILSISYPTLSEVKGVIVHRLEAVSYNIGSQEWYTTVPKYVATNGYLISNFDESSCVFVSESAICSQNSLYPMSPILQQCIRGDTSSCARTLVSGTMGNKFILSKGNIVANCASILCKCYSTSTIINQSPDKLLTFIASDTCPLVEIDGVTIQVGGRQYPDMVYESKVALGPAISLERLDVGTNLGNALKKLNDAKVLIDSSNQILETVKRSSFNFGSLLSVPILICTALALLLLIYCCKRRYRQTFKHNTKVDPTFKPVLTGTSKSYVRSL

SEQ ID NO: 201 - protein, 662 aa, Canine morbillivirus
MHNKIPKKSKPLPHTRQDPLQQHSTRSTETKTSQGRYSITSAQRSTYHSPRTSDRSVHYIMNRTRSCNQTSHRSDNIPPHRDHEGIIHHTPESVTQGASSWFKRWQSNATNAGSQCTWLVLWCIGIASLFLCSKAQIHWNNLSTIGIIGTDSVHYKIMTRPSHQYLVIKLMPNVSLIDNCTKAELGEYEKLLNSVLEPINQALTLMTNNVKPLQSVGSGRRQRRFAGVVLAGAALGVATAAQITAGIALHQSNLNAQAIQSLRTSLEQSNKAIEEIREATQETVIAVQGVQDYVNNELVPAMQHMSCELVGQRLGLKLLRYYTELLSIFGPSLRDPISAEISIQALSYALGGEIHKILEKLGYSGNDMIAILESRGIKTKITHVDLPGKLIILSISYPTLSEVKGVIVHRLEAVSYNIGSQEWYTTVPKYVATNGYLISNFDESSCVFVSESAICSQNSLYPMSPILQQCIRGDTSSCARTLVSGTMGNKFILSKGNIVANCASILCKCYSTSTIINQSPDKLLTFIASDTCPLVEIDGVTIQVGGRQYPDMVYESKVALGPAISLERLDVGTNLGNALKKLDDAKVLIDSSNQILETVKRSSFNFGSLLSVPILICTALALLLLIYCCKRRYRQTFKHNTKVDPTFKPDLTGTSKSYVRSL

SEQ ID NO: 202 - protein, 662 aa, Canine morbillivirus
MHNKIPKKSKPLPHTRQDPLQQHSTRSAETKTSQGRYSITSVQRSTYHGPRTSDRSVHYIMNRTRSCKQTSHRSDNIPPHRDHEGIIHHTPESVTRGASSWFKRRQSNATNAGPQYTWLVLWCIGIASLFLCSKAQIHWNNLSTIGIIGTDSVHYKIMTRPSHQYLVIKLMPNVSLIDNCTKAELGEYEKLLNSVLEPINQALTLMTNNVKPLQSVGSGRRQRRFAGVVLAGAALGVATAAQITAGIALHQSNLNAQAIQSLRTSLEQSNKAIEEIREATQETVIAVQGVQDYVNNELVPAMQHMSCELVGQRLGLKLLRYYTELLSIFGPSLRDPISAEISIQALSYALGGEIHKILEKLGYSGNDMIAILESRGIKTKITHVDLPGKLIILSISYPTLSEVKGVIVHRLEAVSYNIGSQEWYTTVPKYVATNGYLISNFDESSCVFVSESAICSQNSLYPMSPILQQCIRGDTSSCARTLVSGTMGNKFILSKGNIVANCASILCKCYSTSTIINQSPDKLLTFIASDTCPLVEIDGVTIQVGGRQYPDMVYESKVALGPAISLERLDVGTNLGNALKKLDDAKVLIDSSNQILETVKRSSFNFGSLLSVPILICTALALLLLIYCCKRRYRQTFKHNTKVDPTFKPDLTGTSKSYVRSL

SEQ ID NO: 203 - protein, 662 aa, Canine morbillivirus
MHNKIPKKSKPLPHTRQDPPQQHSTRSAETKTSQGRYSITSVQRSTYHGPRTSDRSVHYMMNRTRSCKQTSHRSDNIPPHRDHKGIIHHTPESVTRGASSWFKRRQSNATNAGPQYTWLVLWCIGIASLFLCSKAQIHWNNLSTIGIIGTDSVHYKIMTRPSHQYLVIKLMPNVSLIDNCTKAELGEYEKLLNSVLEPINQALTLMTNNVKPLQSVGSGRRQRRFAGVVLAGAALGVATAAQITAGIALHQSNLNAQAIQSLRTSLEQSNKAIEEIREATQETVIAVQGVQDYVNNELVPAMQHMSCELVGQRLGLKLLRYYTELLSIFGPSLRDPISAEISIQALSYALGGEIHKILEKLGYSGNDMIAILESRGIKTKITHVDLPGKLIILSISYPTLSEVKGVIVHRLEAVSYNIGSQEWYTTVPKYVATNGYLISNFDESSCVFVSESAICSQNSLYPMSPILQQCIRGDTSSCARTLVSGTMGNKFILSKGNIVANCASILCKCYSTSTIINQSPDKLLTFIASDTCPLVEIDGVTIQVGGRQYPDMVYESKVALGPAISLERLDVGTNLGNALKKLDDAKVLIDSSNQILETVKRSSFNFGSLLSVPILICTALALLLLIYCCKRRYRQTFKHNTKVDPTFKPDLTGTSKSYVRSL

SEQ ID NO: 204 - protein, 662 aa, Canine morbillivirus
MHNKIPKKSKPLPHTRQDPLQQHSTRSTETKTSQGRYSITSAQRSTYHSPRTSDRSVHCIMNRTRSCKQTSHRSDNIPPHRDHEGIIHHTPESVTQGASSWFKRWQSNATNAGSQCTWLVLWCIGIASLFLCSKAQIHWNNLSTIGIIGTDSVHYKIMTRPSHQYLVIKLMPNVSLIDNCTKAELGEYEKLLNSVLEPIHQALTLMTNNVKPLQSVGSGRRQKRFAGVVLAGAALGVATAAQITAGIALHQSNLNAQAIQSLRTSLEQSNKAIEEIREATQETVIAVQGVQDYVNNELVPAMQHMSCELVGQRLGLKLLRYYTELLSIFGPSLRDPISAEISIQALSYALGGEIHKILEKLGYSGNDMIAILESRGIKTKITHVDLPGKLIILSISYPTLSEVKGVIVHRLEAVSYNIGSQEWYTTVPKYVATNSYLISNFDESSCVFVSESAICSQNSLYPMSPILQQCIRGDTSSCARTLVSGTMGNKFILSKGNIVANCASILCKCYSTSTIINQSPDKLLTFIASDTCPLVEIDGVTIQVGGRQYPDMVYESKVALGPAISLERLDVGTNLGNALRKLDDAKVLIDSSNQILETVKRSSFNFGSLLSVPILICTALALLLLIYCCKRRYRQTFKHNTKVDPTFKPDLTGTSKSYVRSL

SEQ ID NO: 205 - protein, 662 aa, Canine morbillivirus
MHNKISKKSKPLPHTRQDPLQQHSNRSTETKTSQGRYSITSAQRSTYHSPRTSDRSVHYIMNRTRSCKQTSHRSDNVPPHRDHEDIIHHTPESVTQGASSWFKRWQSNATNAGSQCTWLVLWCIGIASLFLCSKAQIHWNNLSTIGIIGTDSVHYKIMTRPSHQYLVIKLMPNVSLIDNCTKAELGEYEKLLNSVLEPINQALILMTNNVKPLQSVGSGRRQRRFAGVVLAGAALGVATAAQITAGIALHQSNLNAQAIQSLRTSLEQSNKAIEEIREAAQETVIAVQGVQDYVNNELVPAMQHMSCELVGQRLGLKLLRYYTELLSIFGPSLRDPISAEISIQALSYALGGEIHKILEKLGYSGNDMIAILESRGIKTKITHVDLPGKLIILSISYPTLSEVKGVIVHRLEAVSYNIGSQEWYTTVPKYVATNGYLISNFDESSCVFVSESAICSQNSLYPMSPILQQCIRGDTSSCARTLVSGTMGNKFILSKGNIVANCASILCKCYSTSTIINQSPDKLLTFIASDTCPLVEIDGVTIQVGGRQYPDMVYESKVALGPAISLERLDVGTNLGNALKKLDDAKVLIDSSNQILETVKRSSFNFGSLLSVPILICTALALLLLIYCCKRRYRQTFKHNTKVDPTFKPDLTGTSKSYVRSL

SEQ ID NO: 206 - protein, 662 aa, Canine morbillivirus
MHNKIPKKSKPLPHTRQDPLQQHSTRSAETKTSQGRHSITSAQRSTHHGPRTSDRSVHYIMNRTRSCKQTSHRSDNIPPHRDHEGIIHHTPESVTQGASSWFKRRQSNATNAGSQYTWLVLWCIGITSLFLCSKAQIHWNNLSTIGIIGTDSVHYKIMTRPSHQYLVIKLMPNVSLIDNCTKAELGEYEKLLNSVLEPINQALTLMTSNVKPLQAVGSGRRQRRFAGVVLAGAALGVATAAQITAGIALHQSNLNAQAIQSLRTSLEQSNKAIEEIREATQETVIAVQGVQDYVNNELVPAMQHMSCELVGQRLGLKLLRYYTELLSIFGPSLRDPISAEISIQALSYALGGEIHKILEKLGYSGNDMIAILESRGIKTKITHVDLPGKLIILSISYPTLSEVKGVIVHRLEAVSYNIGSQEWYTTVPKYVATNGYLISNFDESSCVFVSESAICSQNSLYPMSPILQQCIRGDTSSCARTLVSGTMGNKFILSKGNIVANCASILCKCYSTSTIINQSPDKLLTFIASDTCPLVEIDGVTIQVGGRQYPDMVYESKVALGPAISLERLDVGTNLGNALKKLDDAKVLIDSSNQILETVKRSSFNFGSLLSVPILICTALALLLLIYCCKRRYRQTFKHNTKADPTFKPDLTGTSKSYVRSL

SEQ ID NO: 207 - protein, 662 aa, Canine morbillivirus
MHNKIPKKSKPLPHTRQDPLQQHSTRSAETKTSQGRHSITSAQRSTHHGPRTSDRSVHYIMNRTRSCKQTSHRSDNIPPHRDHEGIIHHTPESVTQGASSWFKRRQSNATNAGSQYTWLVLWCIGITSLFLCSKAQIHWNNLSTIGIIGTDSVHYKIMTRPSHQYLVIKLMPNVSLIDNCTKAELGEYEKLLNSVLEPINQALTLMTSNVKPLQAVGSGRRQRRFAGVVLAGAALGVATAAQITAGIALHQSNLNAQAIQSLRTSLEQSNKAIEEIREATQETVIAVQGVQDYVNNELVPAMQHMSCELVGQRLGLKLLRYYTELLSIFGPSLRDPISAEISIQALSYALGGEIHKILEKLGYSGNDMIAILESRGIKTKITHVDLPGKLIILSISYPTLSEVKGVIVHRLEAVSYNIGSQEWYTTVPKYVATNGYLISNFDESSCVFVSESAICSQNSLYPMSPILQQCIRGDTSSCARTLVSGTMGNKFILSKGNIVANCASILCKCYSTSTIINQSPDKLLTFIASDTCPLVEIDGVTIQVGGRQYPDMVYESKVALGPAISLERLDVGTNLGNALKKLDDAKVLIDSSNQILETVKRSSFNFGSLLSVPILICTALALLLLIYCCKRRYRQTFKHNTKVDPTFKPDLTGTSKSYVRSL

SEQ ID NO: 208 - protein, 662 aa, Canine morbillivirus
MHSTTPKNSKPLPHIRQDPLQQHSTRSAETKTSQGRYSITSAQRSTYHGPRTSDRSVHYIMNRTRSCKQTSHSSDNIPPHRDHEGIIHHTPESVTRGASSWFKRRQSNATNAGSQHTWLVLWCIGIASLFLCSKAQIHWNNLSTIGIIGTDSVHYKIMTRPSHQYLVIKLMPNVSLIDNCTKAELGEYEKLLNSVLEPINQALTLMTNNVKPLQSVGSGRRQKRFAGVVLAGAALGVATAAQITAGIALHQSNLNAQAIQSLRTSLEQSNKAIEEIREATQETVIAVQGVQDYVNNELVPAMKHMSCELVGQRLGLKLLRYYTELLSIFGPSLRDPISAEISIQALSYALGGEIHKILEKLGYSGNDMIAILESRGIKTKITHVDLPGKLIILSISYPTLSEVKGVIVHRLEAVSYNIGSQEWYTTVPKYVATNGYLISNFDESSCVFVSESAICSQNSLYPMSPILQQCIRGDTSSCARSLVSGTMGNKFILSKGNIVANCASILCKCYSTSTIINQSPDKLLTFIASDTCPLVEIDGVTIQVGGRQYPDMVYESTVALGPAISLERLDVGTNLGNALKKLDDAKVLIDSSNQILETVKRSSFNFGSLLSVPILICTALALLLLIYCCKGRYRQTFKHNTKVDPTFKPDLTGTSKSYVRSL

SEQ ID NO: 209 - protein, 662 aa, Canine morbillivirus
MHSTTPKNSKPLPHTRQDPLQQHSTRSAETKTSQGRYSITSAQRSTYHGPRTSDRSVHYIMNRTRSCKQTSHRSDNIPPHRDHEGIIHHTPESVTRGASSWFKRRQSNATNAGSQYTWLVLWCIGIASLFLCSKAQIHWNNLSTIGIIGTDSVHYKIMTRPSHQYLVIKLMPNVSLIDNCTKAELGEYEKLLNSVLEPINQALTLMTNNVKPLQSVGSGRRQKRFAGVVLAGAALGVATAAQITAGIALHQSNLNAQAIQSLRTSLEQSNKAIEEIREATQETVIAVQGVQDYVNNELVPAMKHMSCELVGQRLGLKLLRYYTELLSIFGPSLRDPISAEISIQALSYALGGEIHKILEKLGYSGNDMIAILESRGIKTKITHVDLPGKLIILSISYPTLSEVKGVIVHRLEAVSYNIGSQEWYTTVPKYVATNGYLISNFDESSCVFVSESAICSQNSLYPMSPILQQCIRGDTSSCARSLVSGTMGNKFILSKGNIVANCASILCKCYSTSTIINQSPDKLLTFIASDTCPLVEIDGVTIQVGGRQYPDMVYESKVALGPAISLERLDVGTNLGNALKKLDDAKVLIDSSNQILETVKRSSFNFGSLLSVPILICTALALLLLIYCCKRRYRQTFKHNTKVDPTFKPDLTGTSKSYVRSL

SEQ ID NO: 210 - protein, 662 aa, Canine morbillivirus
MHSKTLKNSKPLPHTRQDPLQQHSTRSAETKTSQGRYSITSAQRSTYHGPRTSDRSVHYIMNRTRSCKQTSHRSDNIPPHRDHEGIIHHTPESVTRGASSWFKRRQSNATNAGSQYTWLVLWCIGTASLFLCSKAQIHWNNLSTIGIIGTDSVHYKIMTRPSHQYLVIKLMPNVSLIDNCTKAELGEYEKLLNSVLEPINQALTLMTNNVKPLQSVGSGRRQKRFAGVVLAGAALGVATAAQITAGIALHQSNLNAQAIQSLRTSLEQSNKAIEEIREATQETVIAVQGVQDYVNNELVPAMQHMSCELVGQRLGLKLLRYYTELLSIFGPSLRDPISAEISIQALSYALGGEIHKILEKLGYSGNDMIAILESRGIKTKITHVDLPGKLIILSISYPTLSEVKGVIVHRLEAVSYNIGSQEWYTTVPKYVATNGYLISNFDESSCVFVSESAICSQNSLYPMSPILQQCIRGDTSSCARTLVSGTMGNKFILSKGNIVANCASILCKCYSTSTIINQSPDKLLTFIASDTCPLVEIDGVTIQVGGRQYPDMVYESKVALGPAISLERLDVGTNLGNALKKLDDAKVLIDSSNQILETVKRSSFNFGSLLSVPILICTALALLLLIYCCKRRYRQTFKHNTKVDPTFKPDLTGTSKSYVRSL

SEQ ID NO: 211 - protein, 662 aa, Canine morbillivirus
MHSKIPKKSKPLPHTRQDLLQQHSTRSTETKTSQGQYSLTSDQRSTYHSPRTSDGSVHCIMNRTRSCKQTSHRSDNIPPHRDHEGIIHHTPESVTQGASSWFKRWQSNATNAGSQCTWLVLWCIGIASLFLCSKAQIHWNNLSTIGIIGTDSVHYKIMTRPSHQYLVIKLMPNVSLIDNCTKAELGEYEKLLNSVLEPINQALTLMTNNVKPLQSVGSGRRQKRFAGVVLAGAALGVATAAQITAGIALHQSNLNAQAIQSLRTSLEQSNKAIEEIREATQETVIAVQGVQDYVNNELVPAMQHMSCELVGQRLGLKLLRYYTELLSIFGPSLRDPISAEISIQALSYALGGEIHKILEKLGYSGNDMIAILESRGIKTKITHVDLPGKLIILSISYPTLSEVKGVIVHRLEAVSYNIGSQEWYTTVPKYVATNGYLISNFDESSCVFVSESAICSQNSLYPMSPILQQCIRGDTSSCARTLVSGTMGNKFILSKGNIVANCASILCKCYSTSTIINQSPDKLLTFIASDTCPLVEIDGVTIQVGGRQYPDMVYESKVALGPAISLERLDVGTNLGNALRKLDDAKVLIDSSNQILETVKRSSFNFGSLLSVPILICTALALLLLIYCCKRRYRQTFKHNTKVDPTFKPDLTGTSKSYVRSL

SEQ ID NO: 212 - protein, 662 aa, Canine morbillivirus
MHNKIPKKSKPLPNPRQDPLQQHSTRSTETKTSQGRYSITSAQRSTYHSPRTSDRSVHHTMNRTRSRKQTSHRSDNIPPHRDHEGIIHHTPENVTQGASSWFKRWQSNATNAGSQCTWLVLWCIGIASLFLCSKAQIHWNNLSTIGIIGTDSVHYKIMTRPSHQYLVIKLMPNVSLIDNCTKAELGEYEKLLNSVLEPINQALTLMTNNVKPLQSVGSGRRQRRFAGVVLAGAALGVATAAQITAGIALHQSNLNAQAIQSLRTSLEQSNKAIEEIREATQETVIAVQGVQDYVNNELVPAMQHMSCELVGQRLGLKLLRYYTELLSIFGPSLRDPISAEISIQALSYALGGEIHKILEKLGYSGNDMIAILESRGIKTKITHVDLPGKLIILSISYPTLSEVKGVIVHRLEAVSYNIGSQEWYTTVPKYVATNGYLISNFDESSCVFVSESAICSQNSLYPMSPILQQCIRGDTSSCARTLVSGTMGNKFILSKGNIVANCASILCKCYSTSTIINQSPDKLLTFIASDTCPLVEIDGVTIQVGGRQYPDMVYESKVALGPAISLERLDVGTNLGNALKKLDDAKVLIDSSNQILETVKRSSFNFGSLLSVPILICTALALLLLIYCCKRRYRQTFKHNTKVDPTFKPDLTGTSKSYVRSL

SEQ ID NO: 213 - protein, 662 aa, Canine morbillivirus
MHNKIPKKSKPLPHTRQDPLQQHSTRSAETKTSQGRYSITSAPRSTYHGPRTSDRSVHYIMNKTRSCKQTSHRSDNIPPHRDHEGIFHHTPESVTRGASSWFKRRQYNATNAGSQYTWLVLWCIGIASLFLCSKAQIHWNNLSTIGIIGTDSVHYKIMTRPSHQYLVIKLMPNVSLIDNCTKAELGEYEKLLNSVLEPINQALTLMTNNVKPLQSVGSGRRQRRFAGVVLAGAALGVATAAQITAGIALHQSNLNAQAIQSLRTSLEQSNKAIEEIREATQETVIAVQGVQDYVNNELVPAMQHMSCELVGQRLGLKLLRYYTELLSIFGPSLRDPISAEISIQALSYALGGEIHKILEKLGYSGNDMIAILESRGIKTKITHVDLTGKFIILSISYPTLSEVKGVIVHRLEAVSYNIGSQEWYTTVPKYVATNGYLISNFDESSCVFVSESAICSQNSLYPMSPILQQCIRGDTSSCARTLVSGTMGNKFILSKGNIVANCASILCKCYSTSTIINQSPDKLLTFIASDTCPLVEIDGVTIQVGGRQYPDMVYESKVALGPAISLERLDVGTNLGNALKKLDDAKVLIDSSNQILETVKRSSFNFGSLLSVPILICTALALLLLIYCCKRRYRQTFKHNTKVDPTFKPDLTGTSKSYVRSL

SEQ ID NO: 214 - protein, 660 aa, Canine morbillivirus
MHNKIPKKSKPLPHTRQDPLQQHSIRSAETKTSQGRYSITSAQRSTYHGPRTSDRSVHYIMNKTRSCKQTSHRSDNIPPHRDHEGIIHHTPESVTRGASSWFKRRQSNATNAGSQYTWLVLWCGIASLFLCSKAQIHWNNLSTIGIIGTDSVHYKIMTRPSHQYLVIKLMPNVSLIDNCTKELGEYEKLLNSVLEPINQALTLMTNNVKPLQSVGSGRRQRRFAGVVLAGAALGVATAAQITAGIALHQSNLNAQAIQSLRTSLEQSNKAIEEIREATQETVIAVQGVQDYVNNELVPAMQHMSCELVGQRLGLKLLRYYTELLSIFGPSLRDPISAEISIQALSYALGGEIHKILEKLGYSGNDMIAILESRGIKTKITHVDLPGKLIILSISYPTLSEVKGVIVHRLEAVSYNIGSQEWYTTVPKYVATNGYLISNFDESSCVFVSESAICSQNSLYPMSPILQQCIRGDTSSCARTLVSGTMGNKFILSKGNIVANCASILCKCYSTSTIINQSPDKLLTFIASDTCPLVEIDGVTIQVGGRQYPDMVYESKVALGPAISLERLDVGTNLGNALKKLDDAKVLIDSSNQILETVKRSSFNFGSLLSVPILICTALALLLLIYCCKRRYQQTFKHNTKVDPTFKPDLTGTSKSYVRSL

SEQ ID NO: 215 - protein, 662 aa, Canine morbillivirus
MHNKIPKKSKPLPHTRQDPLQQHSTRSTETKTSQGRHSTTSAQQSTHHSPRTSDRSVHYIMNRTRSCKQTSHRSDNIPPHRDHEGIIHHTPESVTQGSSSWCKRWQSNATNAGSQCTWLVLWCIGIASLFLCSKAQIHWNNLSTIGIIGTDSVHYKIMTRPSHQYLVIKLMPNVSLIDNCTKAELGEYEKLLNSVLEPINQALTLMTNNVKPLQSVGSGRRQKRLAGVVLAGAALGVATAAQFTAGIALHQSNLNAQAIQSVRTSLEQSNKAIEEIREATQETVIAVQGVQDYVNNELVPAMQHMSCELVGQRLGLKLLRYYTELLSIFGPSLRDPISAEISIQALSYALGGEIHKILEKLGYSGNDMIAILESRGIKTKITHVDLPGKLIILSISYPTLSEVKGVIVHRLEAVSYNIGSQEWYTTVPKYVATNGYLISNFDESSCVFVSESAICSQNSLYPMSPILQQCIRGDTSSCARTLVSGTMGNKFILSKGNIVANCASILCKCYSTSTIINQSPDKLLTFIASDTCPLVEIDGVTIQVGGRQYPDMVYESRVALGPAISLERLDVGTNLGNALKKLDDAKVLIDSSNQILETVKRSSFNFGSLLSVPILICTALALLLLIYCCKRRYRQTFKHNTKVDPTFKPDLTGTSKSYVRSL

SEQ ID NO: 216 - protein, 662 aa, Canine morbillivirus
MHNKTPKKSKPLPHTRQNPLQQHSTKSAETKTSQGRYSITSAQRSTHHGPRTSNRPVHYIMNRTRSCMQTSHRSDNIPDHRDHEGIIHHTPESVTQGVGFWFKRRRSNATNAGSQCTWLVLWCIGIASLFLCSKAQIHWNNLSTIGIIGTDSVHYKIMTRPSHQYLVIKLMPNVSLIDNCTKAELGEYEKLLNSVLEPINQALTLMTNNVKLLQSVGSGRRQRRFAGVVLAGAALGVATAAQITAGIALHQSNLNAQAIQSLRTSLEQSNKAIEEIREATQETVIAVQGVQDYVNNELVPAMQHMSCELVGQRLGLKLLRYYTELLSIFGPSLRDPISAEISIQALSYALGGEIHKILEKLGYSGNDMIAILESRGIKTKITHVDLPGKLIILSISYPTLSEVKGVIVHRLEAVSYNIGSQEWYTTVPKYVATNGYLISNFDESSCVFVSESAICSQNSLYPMSPILQQCIRGDTSSCARTLVSGTIGNKFILSKGNIVANCASILCKCYSTGTIINQSPDKLLTFIASDTCPLVEIDGVTIQVGGRQYPDMVYESKVALGPAISLERLDVGTNLGNALKKLDDAKVLIDSSNQILETVKRSSFNFGSMLSVPILICTALALLLLIYCCKRRYRQTFKHNTKVDPTFKPDLTGTSKSYVRSL

SEQ ID NO: 217 - protein, 662 aa, Canine morbillivirus; identical to SEQ ID NO: 216

SEQ ID NO: 218 - protein, 662 aa, Canine morbillivirus
MHNKTPKKSKPLPHTRQNPLQQHSTKSAETKTSQGRYSITSAQRSTHHGPRTSNRPVHYIMNRTRSCMQTSHRSDNILDHRDHEGIIHHTPESVTQGVGFWFKRRRSNATNAGSQCTWLVLWCIGIASLFLCSKAQIHWNNLSTIGIIGTDSVHYKIMTRPSHQYLVIKLMPNVSLIDNCTKAELGEYEKLLNSVLEPINQALTLMTNNVKLLQSVGSGRRQRRFAGVVLAGAALGVATAAQITAGIALHQSNLNAQAIQSLRTSLEQSNKAIEEIREATQETVIAVQGVQDYVNNELVPAMQHMSCELVGQRLGLKLLRYYTELLSIFGPSLRDPISAEISIQALSYALGGEIHKILEKLGYSGNDMIAILESRGIKTKITHVDLPGKLIILSISYPTLSEVKGVIVHRLEAVSYNIGSQEWYTTVPKYVATNGYLISNFDESSCVFVSESAICSQNSLYPMSPILQQCIRGDTSSCARTLVSGTIGNKFILSKGNIVANCASILCKCYSTGTIINQSPDKLLTFIASDTCPLVEIDGVTIQVGGRQYPDMVYESKVALGPAISLERLDVGTNLGNALKKLDDAKVLIDSSNQILETVKRSSFNFGSMLSVPILICTALALLLLIYCCKRRYRQTFKHNTKVDPTFKPDLTGTSKSYVRSL

SEQ ID NO: 219 - protein, 662 aa, Canine morbillivirus
MHNKIPKRSKTLPHTRQDLLQQHSTKSAETKTSQGRYSISSAQRSAHHGPLTSNRPVHYIMNRTRSCKQTSHRSDNIPAHRDHEGIIHHTPEGVTQGASSWFKRRQSNASNPGSQCTWLVLWCIGIASLFLCSKAQIHWNNLSTIGIIGTDSVHYKIMTRPSHQYLVIKLMPNVSLIDNCTKAELGEYEKLLNSVLEPINQALTLMTNNMKPLQSVGSGRRQRRFAGVVLAGAALGVATAAQITAGIALHQSNLNAQAIQSLRNSLEQSNKAIEEIREATQETVIAVQGVQDYVNNELVPAMQHMSCELVGQRLGLKLLRYYTELLSIFGPSLRDPISAEISIQALSYALGGEIHKILEKLGYFGNDMIAILESRGIKAKITHVDLPGKLIILSISYPTLSEVKGVIVHRLEAVSYNIGSQEWYTTVPKYVATNGYLISNFDESSCVFVSESAICSQNSLYPMSPILQQCIRGDTSSCARTLVSGTMGNKFILSKGNIVANCASILCKCYSTSTIINQSPDKLLTFIASDTCPLVEIDGITIQVGGRQYPDMVYESKVALGPAISLERLDVGTNLGNALKKLDDAKVLIDSSNQILETVRRSSFNFGSLLSVPILICTALALLLLVYCCKRRYRQTFKHNPKVDPTFKPDLTGTSKSYVRSL

SEQ ID NO: 220 - protein, 662 aa, Canine morbillivirus
MHNKIPKKSNPRQHTRQDLLQQHSTRSTETKTSQGRYSITSAQRSTYHSPLALDRSIHYIMNRTRSCKQASHRSDNIPPHRDHEGIIHHTPESVTQGAGSWLKRWQSNATNAGSQCTWLVLWCIGIASLFLCSKAQIHWNNLSTIGIIGTDSVHYKVMTRPSHQYLVIKLMPNVSLIDNCTKAELGEYEKLLNSVLEPINQALTLMTNNVKPLQSVGSGRRQKRFAGVVLAGAALGVATAAQITAGIALHQSNLNAQAIQSLRTSLEQSNKAIEEIREATQETVIAVQGVQDYVNNELVPAMQHMSCELVGQRLGLKLLRYYTELLSIFGPSLRDPISAEISIQALSYALGGEIHKILEKLGYSGNDMIAILESRGIKTKITHVDLPGKLIILSISYPTLSEVKGVIVHRLEAVSINIGSQEWYTTVPEYVATIGYLISNLDESPCVSVSESAICSQNFLYPMSRSTQQCIRRDTSSCARLLVSGTMGNKFILSKGNIVANCASILCKCYSTGTIINQSPDKLLTFIASDTCPLVEIDDVTIQVGGRQYPDMVYESKVALGPAISLERLDVGTNLGNALKKLDDAKVLIDSSNQILETDKRSSFNFGSLLSVPILICTALALLLLIYCCRRRYRQTFKHNAKVDPTFKPDLTGTSKSYVRSL

SEQ ID NO: 221 - protein, 662 aa, Canine morbillivirus
MHKKFFKNSTTQTHTQQDLLPQHSTKSAETKTSRARHSITSVQRSTHYGPRTSDRPVYYTVNRTGSCKQASYRSDNIPPHGDHEGTVLHTPESVSQGMRSWPKGRQSNAINTDSHCAWLVLWCIGIASLFLCSKAQIHWNNLSTIGIIGTDSVHYKIMTRPSHQYLVIKLMPNVSVIDNCTKAELGEYEKLLNSVLEPINQALTLMTKNVKPLQSVGSGRRQKRFAGVVIAGAALGVATAAQITAGIALHQSNLNAQAIQSLRTSLEQSNKAIEEIREATQETVIAVQGVQDYVNNELVPAMQHMSCELVGQRLGLKLLRYYTELLSIFGPSLRDPISAEISIQALSYALGGEIHKILEKLGYSGNDMIAILESRGIKTKITHVDLPGKFIILSISYPTLSEVKGVVVHRLEAVSYNIGSQEWYTTVPRYVATNGYLISNFDESSCVLVSESAICSQNSLYPMSPLLQQCIRGDTTSCARTLVSGTMGNKFILSKGNIVANCASILCKCYSTSTIINQSPDKLLTFIASDTCPLVEIDGVTIQVGARQYPDMVYESKVALGPAISLERLDVGTNLGNALKKLDDAKVLIDSSNQILETVRRSSFNFGSLLSVPILSCTALALLLLIYCCRRRYQQTIKQNTKVDPTFKPDLTGTSKSYVRSL

SEQ ID NO: 222 - protein, 662 aa, Canine morbillivirus
MHRKPPKKSKTQTHTQRDPPPQHSTKSAETKTPRARHSITSAQRSTHYGPRTSDRPIHYTVNRTGSCKQASYRLDNIPPHGDHEGTVLHTPESVSQGVRSKPKGRQSNAINIASHCAWLILWCIGIASLFLCSKAQIHWNNLSTIGIIGTDSVHYKIMTRPSHQYLVIKLMPNVSLIDNCTKAELGEYEKLLNSVLEPINQALTLMTKNVKPLQSIGSGRRQKRFAGVVLAGAALGVATAAQITAGIALHQSNLNAQAIQSLRTSLEQSNKAIEEIREAAQETVIAVQGVQDYVNNELVPAMQHMSCELVGQRLGLKLLRYYTELLSIFGPSLRDPISAEISIQALSYALGGEIHKILEKLGYSGNDMIAILESRGIKTKITHVDLPGKFIILSISYPTLSEVKGVVVHRLEAVSYNIGSQEWYTTVPRYVATNGYLISNFDESSCVFVSESAICSQNSLYPMSPLLQQCIRGDTTSCARTLVSGTMGNKFILSKGNIVANCASILCKCYSTSTIINQSPDKLLTFIASDTCPLVEIDGVTIQVGGRQYPDMVYESKVALGPAISLERLDVGTNLGNALKKLDDAKVLIDSSNQILETVRRSSSNFGSLLSVPILSCTALALLLLIYCCRRRYQQTIKQNTKVDPTFKPDLTGTSKSYVRSL

SEQ ID NO: 223 - protein, 662 aa, Canine morbillivirus
MHGEIPTGSTTRTHTQQDRPSHPSTKPDETRISRTQHGTTSAKRSTDHDPRKSDRPVHYTMNRARSHKHIGHGPENIPAHGDHEATTQHIPESASKGAKSQLERRQSDAINSGSQCTWLVLWCFGMASLFLCSKAQIHWNNLSTIGIIGTDSVHYKIMTRSSHQYLVIKLMPNVSLIDNCTKAELGEYEKLLNSVLEPINQALTLMTKNVRSLQSLGSGRRQKRFAGVVLAGAALGVATAAQITAGIALHQSNLNAQAIQSLRTSLEQSNKAIEEIREATQETIIAVQGVQDYVNNELVPAMQHMSCELVGQRLGLKLLRYYTELLSIFGPSLRDPISAEISIQALSYALGGEIHKILEKLGYSGGDMIAILESRGIKTKITHVDLLGKFIILSISYPTLSEVKGVIVHRLEAVSYNIGSQEWYTTVPRYIATNGYLISNFDESSCVFVSESAICSQNSLYPMSPLLQQCIRGDTSSCARSLVSGTMGNKFILSKGNIVANCASILCKCYSTSTIINQSPDKLLTFIASDTCPLVEIDGVTIQVGGRQYPDMVYESKVALGPAISLERLDVGTNLGNALKKLDDAKILIDSSNQILETVRRSSFNFGSLLSVPILSCTALALLLLIYCCRRRYQQTLKQNAKVNPAFKPDLTGTSKSYVRSL

SEQ ID NO: 224 - protein, 662 aa, Canine morbillivirus
MHGEIPTGSTTRTHTQQDRPSHPSTKPDETRISRTQHGTTSAKRSTDHDPRKSDRPVHYTMNRARSHKHIGHGPENIPAHGDHEATTQHIPESASKGAKSQLERRQSDAINSGSQCTWLVLWCFGTASLFLCSKAQIHWNNLSTIGIIGTDSVHYKIMTRSSHQYLVIKLMPNVSLIDNCTKAELGEYEKLLNSVLEPINQALTLMTKNVRSLQSLGSGRRQKRFAGVVLAGAALGVATAAQITAGIALHQSNLNAQAIQSLRTSLEQSNKAIEEIREATQETIIAVQGVQDYVNNELVPAMQHMSCELVGQRLGLKLLRYYTELLSIFGPSLRDPISAEISIQALSYALGGEIHKILEKLGYSGGDMIAILESRGIKTKITHVDLLGKFIILSISYPTLSEVKGVIVHRLEAVSYNIGSQEWYTTVPRYIATNGYLISNFDESSCVFVSESAICSQNSLYPMSPLLQQCIRGDTSSCARSLVSGTMGNKFILSKGNIVANCASILCKCYSTSTIINQSPDKLLTFIASDTCPLVEIDGVTIQVGGRQYPDMVYESKVALGPAISLERLDVGTNLGNALKKLDDAKILIDSSNQILETVRRSSFNFGSLLSVPILSCTALALLLLIYCCRRRYQQTLKQNAKVNPAFKPDLTGTSKSYVRSL

SEQ ID NO: 225 - protein, 662 aa, Canine morbillivirus; identical to SEQ ID NO: 224

SEQ ID NO: 226 - protein, 653 aa, Canine morbillivirus
MHNKIPKRSKTRTHQQDLPQRSTKSAEVRTFQARHSTTSALRSTHHGRISDIHHIMNRTRSCRQASHRSDNIPAHGDHEGIIHHTPESVSQGAGPRLKGQRYNATNSGSQCTWLVLWCIGIAGLFLCSKAQIHWNNLSTIGIIGTDSVHYKIMTRPSHQYLVIKLMPNVSIIDNCTKAELGEYEKLLNSVLEPINQALTLMTKNVKPLQSVGSGRRQRRFAGVVAGAALGVATAAQITAGIALHQSSLNAQAIQSLRTSLEQSNKAIEEIREATQETVIAVQGVQDYVNNELVAMQHMSCELGQRLGLKLLRYYTELLSIFGPSLRDPISAEISIQALSYALGGEIHKILEKLGYSGNDMIAILESRGIKTKITHVDLPGKLIILSISYPTLSEVKGVIVHRLEAVSYNIGSQWYTTVPRYVATNGYLISNFDESSCVFVSESAICSQNSLYPMSPLLQQCIRGDTSSCARTLVSGTMGNKFILSKGNIVANCASILCKCYSTSTIINQGPDKLLTFIASDTCPLVEIDGVTIQVGGRQYPDMVYESKVALGPAISLERLDVGTNLGNALKKLDDAKVLIDSSNQILETVRRSSFNFGSLLSVPILICTALALLFLIYCCKRRYQQTLKQSTKVDPTFKPDLTGTSKSYVRSL

SEQ ID NO: 227 - protein, 80 aa, Canine morbillivirus
KSIASAANPILLSALSGGRGDIFPSYRCSGATTSVGRVFPLSVSLSMSLISRTSEIINMLTAISDGVYGKTYLLVPDFLE

SEQ ID NO: 228 - protein, 80 aa, Canine morbillivirus
GIFGATPMDQVEEVIPVAHPSVEKIHIANHRGFIKDSIATWMVPALVSEKQEEQKNCLESACQRKSYPMCNQTSWEPFGG
